United States Patent Application Publication US 2006/0123505 A1 - sequence listing, part 22

SEQ ID NO: 53245 - protein, 665 aa, Oryza sativa
MDLNASPSPEEDDQSYEEHADFSQSEHAESAVEIMRREREERRRKLKREQHDDGPRLNRQPIRNDHMNQNKIIRHGRIKEPPQGWLDCPGSGEPIDRIVPSKVPLDETFNESVPAGKRYSSKQVVNKQRKAGRDIGLVIDLTNTTRYYSPTEWTRQGTKYVKIACKGRDAVPDNESVNTFVYEVMAFLDRQKQSRNPKYILVHCTHGHNRTGFMIVHYLMRTQLSSVTEALNIFAQRRPPGIYKNDYIQAIYSFYHEIPENIVCPPTPEWKRPSDLDLNGEAKQDDDDDGNVDRAPSPNHEDDKVITNDDILGDAVPYDQQDFLRSICFRLLELVPSGRANAQFPGSHPVSLNSENLQILRQRYYYATWKADGTRYMMLITRDGCFLIDRNFCFRRVQMRFPLRNSNEGFHHYTLIDGEMIVDTVPDLGLKRRYLAYDLMSINSQSVVKLPFSERWKLLDDEIIRPRYHDKGRSPSYKYDMELFSVRRKDFWQLSAVNKILKEFIPKLCHESDGLILQGWDDPYVTRTHEGLLKWKYPEMNSVDFLFEIGSENRQFIFLYERGRKKLMDGARVVFPDEVDPPSISGKIVECSWNKEEDCWSCMRIRTDKSTPNDINTYRKVMRSITDNITEDKLLEEIYEIMNLPMYADRKAKAHARSMAQQRRR

SEQ ID NO: 53246 - protein, 43 aa, Oryza sativa
MKVAEMKMLVKVLEDSLKGKMLQLQEVTTVLMDLQVQALLMHL

SEQ ID NO: 53247 - protein, 635 aa, Oryza sativa
MGSLETTNTRYRPAGAADDTAKRRTQKSKSFKEVEKFDVFVLEKSSGCKFRSLQLLLFAIMSAAFLTLLYTPSVYDHQMQSSSRFVSGWIWDKTIPDPRYVSSLGVQWEDVYKTVENLNDGERKLKVGLLNFNSTEIGSWTQLLPDSDFSIIRLEHAKESITWQTLYPEWIDEEEETEIPSCPSLPDPIFPRGTHFDVVAVKLPCTRAGGWSRDVARLHLQLSAAKVAVTASRGNRGIHVLFVTDCFPIPNLFSCKNLVKHEGNAWMYKPDLKALREKLRLPVGSCELAVPLKAKARLYSVDRRREAYATILHSASEYVCGAITAAQSIRQAGSTRDFVILVDETISNHHRKGLEAAGWKVRIIQRIRNPKAERDAYNEWNYSKFRLWQLTDYDKIIFIDADLLILRNVDFLFAMPEITATGNNATLFNSGVMVIEPSNCTFQLLMDHINEITSYNGGDQGYLNEIFTWWHRIPKHMSFLKHFWEGDEEEVKVKKTRLFGADPPILYVLHYLGLKPWLCFRDYDCNWNNPILREFASDVAHARWWKVHDKMPKKLQHYCLLRSRQKAGLEWDRRQAEKANFTDGHWRRNITDPRLKTCFEKFCFWESMLWHWGESKNSTKENPVPATPTASLTSS

SEQ ID NO: 53248 - protein, 707 aa, Oryza sativa
MASQTADATGFVASDPLSWGKAALEMTGSHLDEVKRMVAQSREAVVKIEGSSLRVGQVAAVSAAKDASGVVVELDEEARPRVKASSEWILNCIAHGGDIYGVTTGFGGTSHRRTKDGQALQVELLRHLNAGIFGNGSDGNSLPSEVSRAAMLVRINTLLQGYSGIRFEILEAITKLINTGVSPCLPLRGTITASGDLVPLSYIAGLITGRPNAQAVTVDGKKVDAAEAFKIAGIQGGFFRLEPKEGLAIVNGTSVGSALAAMVLYDANVLAVLSEVLSAVFCEVMNGKPEYTDHLTHKLKHHPGSIEAAAIMEHILAGSAFMPHAQKVNEVDPLLKPKQDRYALRTSPQWLGPQIEVIRAATKSIEREVNSVNDNPVIDVHRGKALHGGNFQGTPIGVSMDNTRLAIANIGKLMFAQFSELVNEFYNNGLTSNLAGSRNPSLDYGFKGTEIAMASYCSELQFLANPVTNHVQSAEQHNQDVNSLGLVSARKTAEAVDILKLMSSTYLVALCQAVDLRHLEENLKSAVKNCVTTVAKKVLTTGPAGGLHSARFSEKALLTAIDREAVYSYADDPCSANYPLMTKIRAVLVEHALANGPAEKDDGSSVFSKITAFEEELREALPREMEAARVAFETGTAPITNRIKESRSFPLYRFVREELGCVYLTGEKLKSPGEECNKVFLAISERKLIDPMLECLKEWNGEPLPIC

SEQ ID NO: 53249 - protein, 583 aa, Oryza sativa
MDKVKAWAGANYAEPMGSVEQSLRVAYVVLSFCAAFFLGGIKAAVVGPVAAALMVLGNVGVILLLFPAHVWWTIYSLIKTERINAGLKLAVLIALPVLFGLWLGLGIFGSALVALGYGFFTPWIATFEAFRQESESKKFVHGVVDGTWGTIKGSCTVVRDFADLCFHSYPVYLKELRESSQNCEPHSIRVLDVPSCIAVGLLGLIVDIPLYTVIALIKSPYMLFKGWQRLLHDLISREGPFLETVCVPIAGLAILFWPLVVVGSVLLAIVSSIFVGLYGAVVVYQEKSFQRGVSYVVAMVAEFDEYTNDWLYLREGTVLPKPSYRKRKSSSSTEFSVRTNASVKGGDQPSSNEAPAMLVPTLAPARSVREAIQEVKMVQIWENMMKNCELRGRDLLNLNVITTVDLTEWLRTKESGHEAIGLGVPSYSLLCMILHSIKAGSGGLLIGNGIEINQYNRPQDRLIDWFLHPVLVLKDQIQALKMTEEEVRFLEKLTLFIGNSERANGWDNGAEIPQDPVRAGQIQAISRRLVGIVRSMSKFPTYRRRHRHVMKLLVTYSVEKEGSFRSSASNRSVPIFEITQLEV

SEQ ID NO: 53250 - protein, 591 aa, Oryza sativa
MPPTPPLAALHRFLASPSPPPLPSLLTLHALAVTSGLSPRPDFAAKLVSAYSSAGLPALAALAFAASPCPDAFLWNSLLRSRHRASDFASTLSAHRRMRASGARPSRFTAPLVASAAAELGALPVGAAVHAYSVRFGLLEGDGSVAVASSLVYMYARCGSVRDAVRLFDEMPERDVVAWTAVISGCVCNGQCGEGLSYLVRMVRSAGDGGARPNSRTMESGLEACGVLGELSVGTCLHGFGVKAGVGHCPSVVSSLFSMYTKCDSTEDARILFPELPEKDLVSWTSLIGAYCRAGHAEKAVELFLGMEESGLQPDEVVISCLLAGLGNDAKVRGGKTFHAAIVRRNFGDSVLIGNALISMYAKCKQVDIAATVFRMLHQRDTDSWSSMVVAYCKAGLDLKCLELYREMQFRDKDEFEYDTNSLISIISSCSRLGRLRLGQSAHCYSIKHLAGENSSVANALISMYGRCGNFDVARKIFGMVKTKDVVTWSALISSYSHLGHSKDALLLYDQMLTEGVKPNSATLVSVISSCANLAALEHGELIHSHVKDVGLECDLSICTALVDMYMKCGQLGIARKMLIPCSKGMLLLGM

SEQ ID NO: 53251 - protein, 1164 aa, Oryza sativa
MEPSPEIPPPPPAFAAGGEGDPHAPTTAAARSSSSSSLFPLFPLSAPEESSAPAAGSQWLSNPSFSFDASSLNIPATASSSVPPPLSASSDEEEAPRPAPAKYDLLPYSPSPPASDEERRDRRKDRKRRKRRREKERYNSAEASRKPGVRAWAGSETKLAKDYYFDAKGDQDNLAFGSIYRMDIARYKSQNMPEARGLKRLLFHNLGVSVHMGHESDLDGLNSKARAGGRYYSAKYAVVERNKGFKHLKVLKKDNSAILPEDFIPLGIPSLPENNTTGEQELEESWEDEILRRTREFNKMSREFPHNEKIWLDFARFQDKVASTQPQKAARLQTTERKISILEKAVELNPDNEELLLYLLKAYGERDSTQNLLDKWEQILMKHPDSCKLWKQYLLLCQGEFSRFKVSDLRKSYAYAVQALSAACTKLCRQDTQYDRLEPKYSSLIHLELGLVDIFVNLCRFEWHTGHRELATALFQAQIEFSLFSPPLHLTTSSKQRLFEHFWNNGGARIGEDGALGWSRWLAKDEESRQNIDIQENTQETERGGWNGWFDPSLRTNSETSKVEPSTSDGNDAENPDDEDPSAQEDVESLLKKLGIDGDADYNSEVKDPKTWNRWSFMELSRDNEQWMPLHEKLGSLYSDDAPTGEDNDQLSRVILFEDITEFLFSLSSEEARFSLICQFIDFYGGKISRWTSTNSSSWIDRNLSLEMITGDIQEDLSTVSNLIDKNQTSVHNKMVSLLGTMHEFSQRPGTAKFLKNAILLFLDVFPRNHILEEAVLVTPQIHTAQEKYLATPATASRALAKNLLKKDRQDLLLCGIYGRIEAMNGDFVKARHIFDLALSTSQGASEDLRKKVPILYFWYAEMELAIYASRNNSDSVDRAIHVLSCLGDKAKYASFDGSISRPQVLKARQGFKEQIRSLRSSFASDGMKEESVALICSASLFESMTSGFASGLEVIEETFYMTPSENNHSLEFEELWMHYIKQLQKNLNQLSLSRVWPKISQGIQTYPYNPKSYAAMLTLGCLYSVSNNLRLTLDKFNQRDPSIIGLLFALSFELCKAGSDNRIHNLFERALTDDKLQKSVLLWRCYLAYEAEIACNASAARRVFFRAIHACPWSKRLWLDGFEKLSSILTLKELSDLQEVMRDKELHIRTDIYEILLQDETDT

SEQ ID NO: 53252 - protein, 307 aa, Oryza sativa; identical to SEQ ID NO: 31595

SEQ ID NO: 53253 - protein, 360 aa, Oryza sativa
MIRGIYGSRKLYIAYLGEKKYDDPTLVTASHHDMLTSVLGSKEEALASIAYSYKHGFSGFAAMLTEEQADNLADLPEVISVTPNKQHELLTTRSWDFLGLNYQPPNKLLQRSKYGEDVIIGMIDTGIWPESRSFSDHGYGPIPSRWKGVCQLGQAWGPTNCSRKIIGARYYAAGIEKADFKKNYMSARDMIGHGTHTASIAAGAVVDGVSVHGLATGVARGGAPRARLAVYKVIWNTGNSLQLASAGVLAALDDAIHDGVDILSLSIHADEDSFGALHAVQKGITIVYAGGNDGPRPQVIFNTAPWVITAAASKIDRSFPTTITLGNKQTLVVNSRNTISWLRSILHIGYDYCLHRKQER

SEQ ID NO: 53254 - protein, 142 aa, Oryza sativa
MESGYGFRFSDDDVVGRWLSYLFVAGRRRRCRFLELCLIGFWILDLQESASSLTVGERLCAAFLPFVAIAEAVFFALTDCLADLLPPSAAASRHRRSAASSYLAAVARKWNHQQRGRVGIGCTSLTLRQLARLADESRCCNL

SEQ ID NO: 53255 - protein, 104 aa, Oryza sativa
MCRRTVVHCQEQRDGSGDGGREGDLKENLEGYVCGLVQEVAWSNRYWALFGRLETHVRMCCLQNLEEYMFLLEEAMLRWLMALFEMLMFFLPWLLFQAWCSICQ

SEQ ID NO: 53256 - protein, 520 aa, Oryza sativa
MELEGDPRLVGVALGEYLTDGEEVMVVGGAGEVAVAARVVKVDGGKVVVAMDEDAAAGGGVGVGVVSDLLYATGSAAVGEGYGGECTDNMQELLDGGGAEERMLGVELGGFRGEAGWTLMPVGDAAIETSEEMSDPVTLQYSETGLTGDDQRAKYRLPPLDGYGFRASGLVWSKLKGHPWWPGEIFDTSDASELALKHQKKKGSHLVAYFGSNTFAWCDESQLKPFMSNYSQMANQSNSDAFISSVNLALEEISRRILSGMCCFCLPEDLSDNCMSYMVENSGLRDGVTCSKVTRSEILECFNAENFLSYLRSLALFPGQGGELLDLVIACSQLTSFFQSKGCHELASFGSGSELVDDGMDSSSTKNVLLPEAVTYEQKPSEGKPKRRRIKTCVKKPQNDLELTEENPISSLNNECTFVDCMGLNIIGKVKGKRSEKRRKYVPSPEVHTTDHGQDDSWSGFCLNNDPTDTLGEASAKMRPRRKQRSSKETCAPSSDLSSHVPPLQLGLLGPKKQIQLIER

SEQ ID NO: 53257 - protein, 313 aa, Oryza sativa
MEATAKYNRGNPAVKRILQEVKEMQSNPSPDFMAMPLEEDIFEWQFAILGPRDSEFEGGIYHGRIQLPSDYPFKPPSFMLLTPSGRFEIQKKICLSISNYHPEHWQPSWSVRTALVALIAFMPTPGGGALGSLDFKKEDRRALAIKSRETPPKFGSAERQKVIDEIHEQMLSRAPPVPQLLTNETNEETNQLPASDASDEHAHKAVGGVNTAGSNSDSVNNDLPRPDSESEIVQHIVEGRTEGVSNHSRANLSRENIPRVAPTPQNPVVAIQKPKHDRLLTLAAFGLTLAIMALVIKKFFKINGLAGYIEGKF

SEQ ID NO: 53258 - protein, 233 aa, Oryza sativa
MSWRFPLFGNSQQQQPDPNFQDNPTQPWYPQSVVGSSSHPSTPSSSNVGPHQRASDNSQSSSRAQPSPAEAAGIIARLKDKSVDELQRLLKDKEAYNAFFNSLDQVKTQNNLRDELRKETVQLARENLEKEQRILELRNQCTIIRTTELAAAQDRLAELERQKDEIMRSYSPAALLDKLQKSMAKLDEESEELHQKFLEKDIDLPTFVQKYKKLRAAYHKQALLHLAGKTSLR

SEQ ID NO: 53259 - protein, 607 aa, Oryza sativa
MDDVDSVVGSGDKAGEAPGDDGSSTPLPETVQVANSPTYKLDRKLGKGGFGQVYVGRRISSPGVTDRTPGANALEVAIKFEHRTSKGCNYGAPYEWQVYNTLSGIHGVPRVHYKGRQGDYYIMIMDMLGPSLWDVWNNNSHSMSVEMVACIAIEAISILEKMHSKGYVHGDVKPENFLLGTPGTLEEKKLFLVDLGLATRWKDTGSGEHVEYDQRPDIFRGTVRYASVHAHLGRTGSRRDDLESLAYTLVFLLRGRLPWQGYQGENKGFLVCKKKMATSRESLCCFCPQPFRQFIEYVVNLKFDEEPNYAKCISLFDGIVGPNPDIRPINTDGAQKLIYQVGQKRGRLTMDEDDDEQPKKKIRMGMPATQWISVYNARRPMKQRYHYNVADGRLAQHITKGNEDGLFISSVASCSNLWALIMDAGTGFTSQVYELSQHFLHKEWIMDQWERNFYITSLAGANNGSSLVVMSRGTQYAQQSYKVSDSFPFKWINKKWKEGFYVTAMATAGSRWAVVMSRNAGFTDQVVELDFLYPSEGIHRRWDNGFRITATAATWDQAAFILSIPRRKPADETQETLRTSAFPSQHVKEKWSKNLYLASICYGRTVS

SEQ ID NO: 53260 - protein, 549 aa, Oryza sativa; identical to SEQ ID NO: 50264

SEQ ID NO: 53261 - protein, 255 aa, Oryza sativa; identical to SEQ ID NO: 38067

SEQ ID NO: 53262 - protein, 422 aa, Oryza sativa
MIKHEYQIKCFVQQLLHGLDHCHKNGVLHRDIKGSNLLIDNNGVLKVADFGLAISYDPKNPQPLTSRVVTLWYRPPELLLGATEYGVAVDMWSTGCIVAELFAGKPIMPGRTEVEQIHKIFKLCGSPMDDYCKKSKVPETAMFKPQHQYRRCVAETFKVFPTSAVVLIDSLLSLDPGARGTAASALQSDFFTKEPFACDPSSLPKLPPSKEYDVRLRQEEARRQKTAALAGQGAESVRPENDNRVTNRTISGVNGELKQQTHTSSKSNSEVFNQEDSVPGFRVEPRERPTAVQLPGYSSTWNNMEGDNDQPTVPGRACCSVRVANPCGIRKKGSSHSLIPQFGATDLRSTVEATDHNDSPDRHDENKNPEVKDGMNHGRKYRRIHHSGPLMPPGGNVEDMLKEHERQIQEAVRKARVSKPGR

SEQ ID NO: 53263 - protein, 231 aa, Oryza sativa
MMAAAAAAAATSCTGCSCWRRSRRRRRRRRRSGPPLAPTPRMNRMMVRRRWRARRRRRRWRPRRVGGRRRRSAAAAAVARSPASTPSTTRSQSRGGCPTSSPASRGRSPTCRTWPPPAQPRRASPSRRTHSTSAAASSAAPPSAASPPPPSPRSRPSCRRTTIHRRPTTAAAAAAMAEDNDEEEEEEDEMMKRIKFSEDKLIKQRWIIWMDPFCNSLGSHLIKSTIKNTLY

SEQ ID NO: 53264 - protein, 80 aa, Oryza sativa
MSGAGQSRGHRLGLHIDSDWPEVLLINDYAVFMGYLSMVVTGTGFLVLTWSTVILLGGFVSMLSNKDFWSLTVITLVQTR

SEQ ID NO: 53265 - protein, 303 aa, Oryza sativa
MAPKRLVCFLAVAAALATTCHGWGAGAGDVVSSSAAALSFVDRLRQMMIPAAVGDGDYCDSWRVGVEANNVRGWTATPRKCDNYVENYMRGHHYRRDSKVVVDEAAAYAEAAVLSGDPAADANATWVFDVDETALSHVKFYKKHGFGYHRTDEPAFMEWLIAGRASALPNTVTLYKKLLLLGVKIVFLSDRPDTPELRNATATNLIKEGFDCWDELILRSENSTATGSVVEYKSGERKKLEEEKGMVIIGNIGDQWSDLLGSPEGRRTFKLPNPAYYIDNYKRAGAAVRAAVAITASSSSSSS

SEQ ID NO: 53266 - protein, 644 aa, Oryza sativa
MNPLPPPASRLWEASIRKLKYSTILRGSVVPSGAAFDGAAAAATGGDPVTLTPSLSVSSSTSNTIYQYEDGDDDIDSVLDDVDTDDDDVDEASLGEPSHSDQLLPSGDFYQGDLRGDLPHGAGKYLWTDGSMYEGSWRGGRAAGRGKFSWSSGAIYEGDLAGGYMHGQGTYIGELGDTFAGLWANNLRHGRGTQAYVNGDVYDGHWRDGLQDGHGRYIWRGGHEYIGTWKAGEMHGRGTVIWADGDRYDGAWEDAKPKGQGTFRWSDGGMYIGLWCQESGETQGKGVYYPPSGGPAVPLPREPKEVITKLLEELEMSEGKTVSLLPSQKVLTWPGVEPVTKKPVWRPPEVAADQGMWRPPEVGADQGRRSSRRNSMSSDIDSLVEGEDGGEETRNDRSWVRTPSCMRAPTLPKPGKKQGETISKGHKNYELMLNLQLGIRHAVGRQSAPASLDLKSSAFDPKEKVWTRFPPEGSKHTPPHQSCDFRWKDYCPLVFRTLRKLFDVDPGDYMLSICGDDALLEFSSPGKSGSFFYFTNDDKYMIKTMKKAEVKVLLRMLPAYYKHVRSFDNTLVTKFFGLHCVKITGAIQKKVRFVIMGNLFCSNYSIHRRFDLKGSSHGRTTDKPLDQIDETTTLKDLDLISFSG

SEQ ID NO: 53267 - protein, 127 aa, Oryza sativa
MEGMTLSTILCLGHSTVPIMMTSTSQTLPLHQSKRVDLESHGMIFTHGWKGQSHGMFFTISSRDGESRVVRISFCSSGICLTLLFHLLLLCFQRTEKHGMFSYLDPLMVVLLLGSLIPLRRLQKLGL

SEQ ID NO: 53268 - protein, 250 aa, Oryza sativa
MNVPAVCSVDQAVLALYAAKRTSGIVVNIGFNATSIVPIFQGRVMHEIGVETVGQGALKLTGFLKELMQQRNITFESLYTVRTIKEKLCYVAADYEAEKRKDTQASCEVDGEGWFTLSEERFKTAEILFQPQIGGVRAMGLHKAVSLCMDHCYNSEVFGDDNWYKTVVLSGGSSCLPGLSERLEKELRELLPAHISEGIRVIPPPFGTDSAWFGAKMISNVSTFTEAWCIKKKQFRQKTRRNGPSFVNVW

SEQ ID NO: 53269 - protein, 166 aa, Oryza sativa; identical to SEQ ID NO: 49295

SEQ ID NO: 53270 - protein, 884 aa, Oryza sativa
MMQGIMLAALLVLCQLIKNAGKITDAACISSERDALLAFKAGFADPAGGALRFWQGQDCCAWSGVSCSKKIGSVVSLDIGHYDLTFRGEINSSLAVLTHLVYLNLSGNDFGGVAIPDFIGSFEKLRYLDLSHAGFGGTVPPRLGNLSMLSHLDLSSPSHTVTVKSFNWVSRLTSLVYLDLSWLYLAASSDWLQATNTLPLLKVLCLNHAFLPATDLNALSHTNFTAIRVLDLKSNNFSSRMPDWISKLSSLAYLDLSSCELSGSLPRNLGNLTSLSFFQLRANNLEGEIPGSMSRLCNLRHIDLSGNHFSGDITRLANTLFPCMNQLKILDLALNNLTGSLSGWVRHIASVTTLDLSENSLSGRVSDDIGKLSNLTYLDLSANSFQGTLSELHFANLSRLDMLILESIYVKIVTEADWVPPFQLRVLVLYGCQVGPHFPAWLKSQAKIEMIELSRAQIKSKLPDWLWNFSSTISALDVSGNMINGKLPKSLKHMKALELLDMSSNQLEGCIPDLPSSVKVLDLSSNHLYGPLPQRLGAKEIYYLSLKDNFLSGSIPTYLCEMVWMEQVLLSLNNFSGVLPNCWRKGSALRVIDFSNNNIHGEISSTMGHLTSLGSLLLHRNKLSGPLPTSLKLCNRLIFLDLSENNLSGTIPTWIGDSLQSLILLSLRSNNFSGKIPELLSQLHALQILDIADNNLSGPVPKSLGNLAAMQLGRHMIQQQFSTISDIHFMVYGAGGAVLYRLYAYLYLNSLLAGKLQYNGTAFYIDLSGNQLAGEIPIEIGFLSGLTGLNLSGNHIRGSIPEELGNLRSLEVLDLSRNDLSGPIPQCFLSLSGLSHLNLSYNDLSGAIPFGNELATFAESTYFGNAHTTVKKLFVPQKEASTKL

SEQ ID NO: 53271 - protein, 536 aa, Oryza sativa
MAAAATMTWHEELATLVGDTGVRFPGAGGGSAANVAAAVGGGWYRGEEEDGEGRAVEEEGWAQQARGFLESTAEMLRVLGRGLWDIAAQSLAGAEDSELARRLRGPAAAAGKRLSFMNEYLPEDRDPVWCWVVVAAVAFVTLIVLGVGSVDDTPVELPKKLYIGPPSAKTIQLPDGRHLAYKEQGVTADRARFSLIAPHSFLSSRLAGIPGIKPSLLEEFGARLVTYDLPGFGESDPHPGRDLNSSAHDMLHLAGALRIVDKFWVVGYSAGSIHAWSALRHIPDRVAGAAMFAPMANPYDSKMTKEERRKTWERWSTKRKLMHILARRFPALLPLFYHRSFLSGKQGQPESWLSLSLGKKDKTSLESPMFNAFWEKDVAESVRQGDAQPFVEEAVLQVSDWGFSLSDIQMQKREDLSFFELIKSLFRQAEREWVGFLGPIHIWQGMDDRVVPPSVTEYVRRVVPGATVHKLLDEGHFSYFCFCDECHRQIFSTLFGIPQGPINPVPEPIEVASELTEETTVPDKAKEEEQDISDLA

SEQ ID NO: 53272 - protein, 272 aa, Oryza sativa; identical to SEQ ID NO: 48981

SEQ ID NO: 53273 - protein, 358 aa, Oryza sativa; identical to SEQ ID NO: 28573

SEQ ID NO: 53274 - protein, 677 aa, Oryza sativa
MGPHLVSDLLSINYANSSRRLARKMLLFLLFLLAAGEAAAAAAATTLTATPAKLTQSDREITIRWSGLPDPDGLDYVGIYSPPTSSDRDFLGYLFLNGSATWRTGTGELTLPRLPNLRAPYQFRLFRWPAREYSYHHIDHDGNPLPHGRHRVAASGEVAFDSPSRPDQVHLSFADGVDEMRVMFVCGDGGRRVVRYGPAKEEGEGWKEVAAEVRTYEQKHMCDSPANSSVGWRDPGFVFDGLMKGLEPGRRYFYKVGSNSSGWSDTYSFISRDNEANETIAFLFGDMGTYIPYNTYVRTQDESLSTVKWILRDIQALGDKPAFISHIGDISYARGYAWVWDHFFNQIEPIAANTPYHVCIGNHEYDWPLQPWKPWWATGIYGTDGGGECGIPYSVKFRMPGNSFVPTGNGAPDTRNLYYSFDSGVVHFVYMSTETNFVQGSDQYNFIKADLEKVNRSRTPFIVFQGHRPMYTSSNEARDFAHRQQMLQNLEPLLVTYKVTLALWGHVHRYERFCPMKNFQCVNMSSSFVYPGAPVHLVIGMGGQDYQPFWQPRKDHPDVPVYPQPERSMYRGGEFGYTKLVATKEKLTLTYIGNHDGQVHDMVEIFSGQVSNNNGVPEVIDDTKLSTGVSTKLKIPLFSLEIVGSVMFALVLGFSLGFLIRRKKEAAQWTPVKNEET

SEQ ID NO: 53275 - protein, 271 aa, Oryza sativa
MLTPEDGSADLIRALNNRLIALSFHIREYYWVDMQKLNEIYRYKTEEYSYDAVNKFNIYPDQVSPWLVEWIPPKGGYFIGNLQPAHMDFRFFSLGNLWSIVSSLATTHQSHAILDLIESKWSDLVAEMPLKICYPALENQEWKIITGSDPKNTPWSYHNGGSWPTLLWQLTVASIKMNRPEIAAKAVEVAERRIAIDKWPEYYDTKRARFIGKQSRLYQTWSIAGYLVAKQLLDKPDAARILSNDEDSEILNALSTNRKRGKKVLKKTFIV

SEQ ID NO: 53276 - protein, 536 aa, Oryza sativa
MNALVRVSAVLTNAPYILNLDCDHYVNNSKAVREAMCFMMDPSVGRDVCYVQFPQRFDGIDRSDRYANRNVVFFDVNMKGLDGLQGPVYVGTGCCFYRQALYGYGPPSLPALPKSSVCSWCCCCCPKKKAEKSEKEMHRDSRREDLESAIFNLREIDNYDEYERSMLISQMSFEKSFGLSSVFIESTLMENGGVPESANPSTLIKEAIHVISCGYEEKTEWGKEIGWIYGSVTEDILTGFKMHCRGWRSIYCMPIRPAFKGSAPINLSDRLHQVLRWALGSVEIFLSRHCPLWYGYGGGRLKWLQRLSYINTIVYPFTSLPLIAYCCLPAICLLTGKFIIPTLSNAATIWFLGLFISIIVTSVLELRWSGIGIEDWWRNEQFWVIGGVSAHLFAVFQGILKVIAGLDTNFTVTAKATDDTEFGELYVFKWTTVLIPPTSILVLNLVGVVAGFSDALNSGYESWGPLFGKVFFAMWVIMHLYPFLKGLMGRQNRTPTIVVLWSVLLASVFSLLWVKIDPFIGSSETTTTNSCANFDC

SEQ ID NO: 53277 - protein, 107 aa, Oryza sativa
MKDSAYDADDVMDEFDYLILKANAQQKSKLSSLASSSLAIGKRLVGQDKFRSKLRRVLNSLIRVKECADMLIKVIGAENSNSYMPPQPLQWRVTSSISPGQIIIGRQ

SEQ ID NO: 53278 - protein, 1047 aa, Oryza sativa
MQLLHYKKHSNKFPIPVLALALVLLINLASLTSSCTEQDRSSLLKFIRELSQDGGLSASWQDGTDCCKWDGIACSQDGTVTDVSLASRNLQGNISPSLGNLTGLLRLNLSHNMLSGALPQELVSSSTIIIVDVSFNRLNGGLNELPSSTPIRPLQVLNISSNLFTGQFPSSIWDVMKNLVALNVSSNKFTGKIPTRFCDSSSNLSVLELCYNQFSGSIPSGLGNCSMLKVLKAGHNKLSGTLPGELFNDVSLEYLSFPNNNLHGEIDGTQIAKLRNLVTLDLGGNQFIGKIPDSISQLKRLEELHLDSNMMSGELPGTLGSCTNLSIIDLKHNNFSGDLGKVNFSALHNLKTLDLYFNNFTGTIPESIYSCSNLTALRLSGNHFHGELSPGIINLKYLSFFSLDDNKLTNITKALQILKSCSTITTLLIGHNFRGEVMPQDESIDGFGNLQVLDINSCLLSGKIPLWLSRLTNLEMLLLNGNQLTGPIPRWIDSLNHLFYIDVSDNRLTEEIPITLMNLPMLRSTSDIAHLDPGAFELPVYNGPSFQYRTLTGFPTLLNLSHNNFIGVISPMIGQLEVLVVLDFSFNNLSGQIPQSICNLTSLQVLHLSNNHLTGEIPPGLSNLNFLSAFNISNNDLEGPIPTGGQFDTFSNSSFEGNPKLCDSRFNHHCSSAEASSVSRKEQNKKIVLAISFGVFFGGICILLLLGCFFVSERSKRFITKNSSDNDGDLEAASFNSDSEHSLIMITRGKGEEINLTFADIVKATNNFDKAHIIGCGGYGLVYKAELPDGSKIAIKKLNSEMCLTEREFSAEVDALSMAQHANLVPFWGYCIQGNLRLLIYSLMENGSLDDWLHNWDDDASSFLDWPTRLKIAQGASQGLHYIHDVCKPHIVHRDIKSSNILLDKEFKSYIADFGLSRLVLPNITHVTTELVGTLGYIPPEYGQSWVATLRGDMYSFGVVLLELLTGRRPVPILSTSEELVPWVHKMRSEGKQIEVLDPTLRGTGCEEQMLKVLETACKCVDCNPLKRPTIMEVVTCLDSIGTEIKI

SEQ ID NO: 53279 - protein, 233 aa, Oryza sativa
MGASGRLISIYPEDLTFLFELDKPCYCNLKVVNNSEHHVAFKVKTTSPRKYFVRPNASIIQPWDSCTITITLQAQKEYPPDMQCKDKFLIQSTKVAASTDMDEIPPNTFNKEVDKVIEEMKLKVVYTVPSGSSDDSGITSLGSRSFKLGSDDLTMLKNASIEKIQTIQRLKDERDTTLQQNQQMQRELDVIRRRRSRKSDAGFSLTFAAFAGLIGVLIGLLMSLIFPRPQAAA

SEQ ID NO: 53280 - protein, 114 aa, Oryza sativa
MVVLVVATASGPASIGPAAAFLAMPGWSPGPPIPEGMESFTNGDVRLLKHERSIIAEDDLDNRWQAATGEAVSEVIFLSKHTAVSNRPALTVHPIGWLFLVIKCYMFLVYPWLC

SEQ ID NO: 53281 - protein, 300 aa, Oryza sativa
MEERQAVNPACPNAANPFHRCADYCPVPAPAAATAKPPPPPPSSRPAQNGTAAPQNGTAAAQNGIAEQNGSTHSDGELQAKPRRRDRAGGSGGLPFYVFLREGADGDGKKVDPRCPNAPNPFHVCTEHCAAKMAEVSRSSEGGKSPMSLFSRHSRRSSSSEDGSVRSGSSKKVDPKCPNAGNPFHECTEHCAAKMKEVGQQNKTVKKSSSRKKGGKEISVVQNWKVDPRCPNASNPFHICAQYCFDHLNETGQKDTSKPDSRKGKAVVKAEQTGEINPDCVNASNPYHKCGEHCKRKGDR

SEQ ID NO: 53282 - protein, 174 aa, Oryza sativa; identical to SEQ ID NO: 35346

SEQ ID NO: 53283 - protein, 1068 aa, Oryza sativa
MGVPAFYRWLAEKYPMVVVDVVEEEAVEIEGVKVPVDTSKPNPNGLEFDNLYLDMNGIIHPCFHPEDRPSPTTFAEVFQCMFDYIDRLFVMVRPRKLMYMAIDGVAPRAKMNQQRSRRFRAAKDAADAAAEEERLREEFEREGRKLPPKQQSQTCDSNVITPGTEFMAVLSIALQYYIHLRLNYDPGWKQVKVILSDANVPGEGEHKIMSYIRGQRNLPGFNPNTRHCLYGLDADLIMLALATHEVHFSILREVVYTPGQQDKCFLCGQVGHLAANCEGKVKRKAGEFDEKGEAIVPKKPYQFLNIWTLREYLEYEFRMQNPPFPIDFERIVDDFIFMCFFVGNDFLPHMPTLEIREGAINLLMAVYKKEFPSMGGYLTDACTPDLNKVEHFIQAVGSYEDKIFQKRARLHQRQAERIKREKAQAKRGDDLDPHVRDDLIVPVARFQGSRLASGPVPSPYEQNGSDKNNGGKNSRARKAARVSSSGSSIAAAIVEAENDLEAQERENKEDLKTMLKDALREKSDVFNSENPEEDKIKLGEPGWRERYYEEKFGARTPGQIEEIRRDVVLKYTEGLCWVMHYYYEGVCSWQWFYPYHYAPFASDLSGLGQLNITFELGSPFKPFDQLMGVFPAASSHALPVQYRQLMTDANSPIIDFYPTDFEVDMNGKRYSWQGIAKLPFIDEARLLAEIKKVEHTLTPEEARRNSIMFNMLFVNGSHPLSPYIYSLNSKFGHLPDRERNEIKEKIDPSSSGGMNGYISLCSGDPCPPVFRSPVDGLEDIMDNQVICTIYKLPDSHKHIARPPVGVIIPKKTVEATDLKPPPVLWHEDSGRRPHDNNNRRPYENSNRQNPAGAISGRQLGEAAHRLVVNSLNARSGGQYNTPSMPYQTIMNGMPYPNGIPPRMEQPAPGWHVPGDLPNGQVPPAYASSSGHYQNDRSGPSQYGRDNHGRYPYARDNHHDSRGRVPPYHQSGGNSYQSHSAPSAGPGRYAQPPPYAGGYGRSYQPAPYGGGQQWQQQQQQPYGSYAGSGPYGGGAPPARPNSRPQQSQNRYNTLDRNSNRRPPPGHGRH

SEQ ID NO: 53284 - protein, 63 aa, Oryza sativa
MYCSLILERRKKIGTHNIRHLWMVAAFAMSGYLFGAGVATLIKGNNRRTPEAAGTKEDTTDEH

SEQ ID NO: 53285 - protein, 973 aa, Oryza sativa
MAAAAAPAPAESNVEFIRARSDKREYRRVVLPNALECLLISDSETDKAAACMEVGVGSFSDPEGLEGLAHFLEHMLFYASEKYPGEQDYTKYITEHGGSCNAYTSSETTNFYFDVNVANFEEALDRFAQFFIKPLMSQDAVLREIKAVDSEHKKNLLSDGWRMYQLQKHLASKDHPYHKFSTGSWETLETKPKERGLDIRQELLKFYENYSANLMHLVVYGKESLDCIQSFVERLFSDIKNTDQRSFKCPSQPLSEQHMQLVIKAIPISEGDYLKISWPVTPNIHFYKEGPSRYLSHLIGHEGEGSIFHIIKELGWAMNLSAGEGSDSAQYSFFSISMRLTDAGHEHMEDIIGLVFKYILLLKENGIHEWIFDELVAINETEFHYQDKVHPISYVTDTVSTMRLFPPEEWLVGASLPSKYAPNRINMILDELSAERVRILWESKKFKGSTDSVEPWYSTAYSVENVTPSMIQQWIQKAPTEKLCIPKPNIFIPKDLSLKEAHEKVKYPAILRKTPLSRLWYKPDMLFSTPKVHIIIDFHCPLTSHSPEAVISTSLFVDLLADYLNAYAYDAQIAGLFYSIYRTSAGFQVSVGGYNDKMRILLDAIMKHISNFEVKPNRFCALKETAVKDYQNFKFSQPYSQASYYLSLILEDQKWPLAEKLEALSKLEPDSLAKFMPHLLSKTFLECYIHGNIEPNEATSIVQEIEDTIFNTPNSVFKSMSPSQYLIKRVIMLENELKCYHQIEGLNQKNENSSVVQYIQVHLDDALSNIKLQLFALIASQPAFNQLRTVEQLGYIAGLSLRSDCGVWALEVVIQSTVKDPSHLDARIDEFFKMFESKIHELSDKDFKRNVKSLVDSKLEKFKNLWEESHFYWGEIEAGTLKFDRVESEVALLRELKKEEFIEFFDQHIRLGAPQRKTVSVQVFGGEHLAEFKKAIAEADTPKTYRITDIFGFKRSRPLYRSLKGGPGRITMD

SEQ ID NO: 53286 - protein, 65 aa, Oryza sativa
MHLFKSQLFSASLQLVAKVSLSRCRYSSSAYGVVHIYVVINLACCCHFLRIHYLSPSANQSANTA

SEQ ID NO: 53287 - protein, 55 aa, Oryza sativa
MVFVSAFFLVSGGNILLAQIVRQILHTSLLTARGVGEWMMLWSVAVVCSFWEGSF

SEQ ID NO: 53288 - protein, 342 aa, Oryza sativa
MEKKKVAVPLVCHGHSRPVVDLFYSPVTPDGYFLISASKDGNPMLRNGETGDWIGTFQGHKGAVWSCCLDTNALRAASGSADFSAKVWDALTGDELHSFEHKHIVRACAFSEDTHLLLTGGVEKILRVYDMNRPDAAPRELDKAPGNVRTVAWLHSDQTILSSCSDMGGVRLWDVRTGKIVQTLETKAPVTSAEVSQDSRFITTADGSSVKFWDANHFGLVKSYDMPCTVESASLEPKSGSKFIVGGEDMWVHVFDFFTGEEITCNKGHHGPVHCVRFAPGGESYASGSEDGTIRIWQLSPPNADDNEAVNSNGKPTVGVNEVARKIEGFHIPKEEEQQAEG

SEQ ID NO: 53289 - protein, 636 aa, Oryza sativa
MALQQMVGYQHLLLLFFTLSSRANKLTVVGCNTLAFLGGYNEEEQNVGAGCFSMCPDKQSVDSSGQCSGMGCCQTSIAPNLTSLNVTFDSRFNNSEVNSFNPCSYAFVAEQDWFRFEPDYLEGHKFTDKYKGVPTVLDWVAGRESCAQAPKNRTSYACVSTNSSCINSPNATGYLCACNNGFAGNPYLEGGCQDINECESPGQYCHGICDNTIGGYHCYCGPGTQSTDPKREPCNPITASERARLTKTFIGISVCAIILLSCTFALLIECQKRKLMKEKERFFQQNGGMLLYEQIRSKQVDTVRIFTKEELENATDNFDSSKELGRGGHGTVYKGILKDNRIVAIKRSKIMNMVQKDEFVQEMIILSQINHRNVVRLLGCCLEVEVPMLVYEFIPNGTLFEHIHGKYRTTSISLDARLRIAQESAEALAYLHSSASPPIVHGDVKSPNILLGDNYITKVTDFGASRMLPKDEIQFMTMVQGTLGYLDPEYLQERQLTQKSDVYSFGVVLLELITGKTAIYSENTEEKKSLASSFLLALKENRLESILDRNILGVGTELFQDVAQLAKCCLSTKGEERPLMTEVAERLKAIRSTWREQLIEGANEETVCLLENSSQYDPSTTGRHGSLMALDIETGR

SEQ ID NO: 53290 - protein, 356 aa, Oryza sativa
MKEKHYIFLVRRRLRREVLVPLRKDLELPEIYMSKNQWSDLPYERVASEAMRIYEHLFKKHDEGRFTAFLKDHKDSREAAKHKAKKAAPQPPLLQDIITSLGLASHASNIKRREDAAQQWRTLVDHLRGKGSLCNCMAVCDVNKGGLVKSEGQKLLKVCVGLGFLISELSSPPWTNSVHAFASNYFPLVLPVGSYREKLNFIRQMPCEERFNLKKVFEGIITRAVTSGVTPDNMVKTIFIFTDKFFEKASVRPVELIEHEDFNPLSSRPWHEEYRRVCEEFKRVGFQDVVPQIVLWNLKGPRSAGLTATKDGVMTLSGYSDELMRLFLENNGVVEPEDEMLDAIAGDEYQKLQVID

SEQ ID NO: 53291 - protein, 248 aa, Oryza sativa
MEFEFERRKVTKDDIKELIFREILEYHPQLLKDYMNGSENTSFLYPSAVDNFRRQFAILEENGGKSGALDRKHVSLPRATTVHSTSIPPNEGLDATSQVTQRIPTARPGRTVGPVLPFENPGAADPHSARRVVRNPMVPPAAANKSGYSYNLKSDYSDRQHQEELEKDRVQYRPAQHLMDAKVAPDTAPDIRSSQYYFTRSAPRTDLTDRAALQGSMLYGIAPFNGIAAVAGGYSKVGAVQYGVSRMY

SEQ ID NO: 53292 - protein, 88 aa, Oryza sativa
MILPLAKLGTLALKTMSKPIAIRLKTEASRHPQFRQLIINLAQTNHRVSTNIQRRIYGHSTKVEIRPLNEEKAVQAAADLIGELFVFS

SEQ ID NO: 53293 - protein, 741 aa, Oryza sativa
MAKPNGKEKTGDTGLSMAPPKISKDRFDAAIRAMADIGILKETAAPVLNNLLNLFDYNWVHIEADNYLALADAIFCDSDPKEGQKRQANETNLDADQSNKKLKTKKRSQNPTSKMHGNDNREFVEAPPQQGRGTLSARTVNGKKVTRAHLELPSSQLLIKEPHTCPSIAKNTTIVENNSAVLCHGQDLQTFEVPVATTCPQVVAPSTRKDARRTSGARHDQKHEGVSGAHERNRAVACSNQEIVSSKDSPSNIEVVLSNYGAGKLSFTYNSSLANRSDFHLPDIKLICKKMEARCLRKYKSLEPNFSFKNLIKDTCQCIVESSGPRHEGIIQTVPALDILSKPSVPQILQSNQANSAFMPPNNVMSLGGTSSSCTVAGVSQNSSNMPVVPHQLHIGANRPPHDVNDITKGEERLRIPIINEYGNGILPPPFHYIPHNITLQEAYVNISLARIGDDNCCSDCFRDCLAQSLPCACAAETGGEFAYTTDGLLKGAFLDSCISMIREPLKHPHFYCKICPNERMKIEVNSDSSNTEMNPGPCKGHLTRKFIKECWRKCGCTRNCGNRVVQRGITRHLQVFLTPEKKGWGLRSTEKLPRGAFVCEYVGEILTNIELYDRTIQKTGKAKHTYPLLLDADWGTEGVLKDEEALCLDATFYGNVARFINHRCFDANIIGIPVEIETPDHHYYHLAFFTTRIIEPFEELTWDYGIDFDDVDHPVKAFKCHCGSEFCRDKTRRSKSRARV

SEQ ID NO: 53294 - protein, 464 aa, Oryza sativa
MGWASRWLRGLLGGGKKPNSGSGDPKPAREKKRWGFGKSFREKSPAHPPPPPPPSAAVQRAVTPRRAYTASDEGDDEQSKRAIAVAAATAAVAEAAVAAAQAAAAVVRLTSSGRCAPAAAKREEYAAVRIQAAFRGYLARRALKALRGLVKLQALVRGNIVRRQAAETLRCMHALVRVQRRARACRAIRSQHVSAHPGPPTPEKYDQATHEGVPKHGRSGSLKGSSSKTPGSERLTRERSESCGRNWLDKWVEERYLDDEKNAKILEVDTGKPGRHASRRRSGSHHHHSSCSSMTSEQKSRSYATMPESPSKDSTTAQQSVPSPPSVGMAEALSPLLMAVDIAELCDSPQFFSATSRPGSSRSRAFTPTKSECSRSLFGGYSDYPNYMANTESFRAKARSQSAPKQRPQYEKSSSLRKASAHAFGPGSCAPVAQRTTASLHSKFTNKAYPGSGRLDRLGMPVKY

SEQ ID NO: 53295 - protein, 511 aa, Oryza sativa; identical to SEQ ID NO: 46812

SEQ ID NO: 53296 - protein, 760 aa, Oryza sativa
MLPRCLVAVAVLLLVASHAARGEERRRLLLARQDVLALHGLRGSIGVRAEYWPVKRYPCSWTGVVCRAGRVAELRLTGLRRTRAGARSQGFTVDPLRELTALEVFNASGFPLPGRIPAWFGTGLPASLEVLDLRSTSVNSTLPADLGMSGNLTTLDLAGNSISGSIPATLFLIKGLKFLDLSDNNLTGELPNVSISAGDGTGVFNASGNSLYGAIGDVLGPLRKRFRQVDLSRNYFTEVIGTGFGNSSDGAVDINMNCLSGSSQRSQGDCEAFYKRIGVSLPEPPNALPSPSKKGVKWKYVLAGVLAAAAFLVVLFLVALVFCLMKSGGRRPRGRGLEQNEEGIRSGRRSSSVNPVMLSSMAASPAANGAVKGLPTIVDEFTYEQLHNVTGGFGDDNLVKHGHSGAIYLGELESGFNVVVKKVDLKSSNKNLGELGFLAKNSHGRIVPLLGHLATDEEELLVYKYMAKGDLTSALHRKSVDAEEGLRSLDWITRLKIAIGVAEALCFLHDECSPPLVHRDIQASSVLLDDKFEVCLGSLSDVCTQQSEGSRSFFSRMLRSSKSLDKNASGPPASCSYDVYCFGKVLLELITGNFGVSGSNDTGSEEWLARTLDFIDAHDKEGLSNIVDPSLVVDEDHLEEVWAVSIVAKTCLNPKPSRRPLARYILKALENPLRVVREELQSNSSLTSTSSRSSWHFAFHGDSRRSSELRPTLGQSARKQSVKSQGSDEDEDEEEDSFSFKRASREILPDPVELEKDAVV

SEQ ID NO: 53297 - protein, 638 aa, Oryza sativa
MAEPTPPLPSNAGLRILLSKDRPPASSSSALAAATSAAVSSHTDRDRIIGVFRDALSRTESPEAFALQAVQDAIKPQKQTVLVLEENQSLENALRKLLQELASSAVQSGKRIMQYGDNEENNCPITRLLDIVLYLCERGHVEGGMVFQLLEDLTEMSTIKDCKDVFGYIESKQDVLGKQELFGRGKLVMLRTCNQLLRRLSKANDVVFCGRIIMFLAHFFPLSERSALNIKGVFNTSNETKYEKDATDGISVDFNFYNTLWSLQEHFSNPALTAANLTRWQKFVSNLTVVLSTFEAQPLSDDDGKLNNLDQEEDAAFNIKYLTSSKLMGLELKDPSFRRHILVQCLIFFDFLKAPGKTDEEGPTGSMKEEIDSCEERVKKLLEIIPPKGKDFLQSIEHILEREKNWVWWKRDGCLAFEKQPFEKKPGQAGVRKRKPRWRLGNKELAQLWKWAEQNPNALTDSERICMPSVTEYWKPLAEDMDPSAGIEDEYHHKNNRVYCWKGLRFSARQDLEGFSRFCDYGIEGVVPQELLPPEVRSKFYSKPGDKAKRPKREDPKGTSAQPKEQQVVSATPETDGGGSGAEPEEGAVPMDSDNAAIDEGRKQSPEEVSGPESGQCEAEADGEDNMKNEASKDGPSA

SEQ ID NO: 53298 - protein, 516 aa, Oryza sativa
MEAPSSSPSSPSLKDHLSSPTGPLHLKVWEVTCIVLGAFMVVIFFVTVWLTIRSRKRVRRASANIPITQIPAISKEIKEVRVEQVPTSDFAAHDGVLMTIQDKSSEKESDKVMVHLGVSKSKRGDESHSGSFRYMDKDLGFQSADEGGSGTFRHNSAHAITAPSPLVGLPEFSYLGWGHWFTLRDLEVATSRFSKDNILGEGGYGVVYRGQLINGTPVAVKKLLNNLGQAEKEFRVEVEAIGHVRHKNLVRLLGYCVEGTQRMLVYEYVNNGNLEQWLHGAMSHRGSLTWEARVKILLGTAKALAYLHEAIEPKVVHRDIKSSNILIDDDFDAKVSDFGLAKLLGAGKSHVTTRVMGTFGYVAPEYANTGLLNEKSDIYSFGVVLLEAITGRDPVDYGRPANEVNLVDWLKMMVASRRSEEVVDPTIETRPSTRALKRALLTALRCVDPDSEKRPKMGQVVRMLESDDPIPRGDRRSKHNRGGSTEMDSQRDNNSDTDKSDNPDSKPSRSRASSSK

SEQ ID NO: 53299 - protein, 207 aa, Oryza sativa
MVTLEMCMTGLDAKKAEVFFKDSTDGSCSSAKEMTMFSGISEIIPEMEICDFEFDPCGYSMNGIYGPAVSTIHVTPEEGFSYASYEAMNFNPSSLVYDDLIKKVLACFCPSDFSVAVTIFGGHGFAKSWAKGAEVDSYMCDDLVEQELPGGGVLMYQSFTAVTPGAVSPRSTLDGWNSDGAEMVAKSKEMSVCWEGEKAAKKRDADA

SEQ ID NO: 53300 - protein, 309 aa, Oryza sativa
MSSLQNMERCFPNAQINGMSSPNIFLGNGRSEEVSTAGIEKSSYQFTDEMRNMSYNRSDNEHGFFWGELQRSYLKVACEEPHSTTSSTRSTSSISKTPQQVLDSLFKIPEQRTYEPSSMDWKKVVKRLQSFNSPITSNNQEKPKNGNGYQEFRTVAGRHYDTMKTYYQKAAMAYSKGEKSYASYLAEEGKHYRELARMEDERASREIFEARNKHITNTVTIDLHGQHVKQAMRLLKVHMMICVCMPTTFLRVITGCGVEGTGKGKIKRAVAELVEKEGVEWHEENAGTIVLRLGGPREYRFLEHDSDSN

SEQ ID NO: 53301 - protein, 646 aa, Oryza sativa
MGEGVKAMLAKPIQLADQVAKQAGWQCFRAECMDLRSRAEKLAALLRQAARAELYERPAARIMADTVRALNKAAGMAARCFQSHSRLRRFFTLNPVSGLPRTLAMLDTALEDVAWLLRISSPHADAGGGGDDDDYDLHGLPNIAQNEPILFLIWDHIARLHTGNLAARADAAHNLASLARDNPHFAKLIIEEDGVAPLVKLLKDGTDDGQEAAATALGLLARDEESVDKLLLAGVCSVFAAALKVPPMRVQAAVAESVAALAHHNQKCQDLLAQTNAVRHLVGHLAAGTIQEHSRYYVAWTGSRNMNMTSLHSVVLAKTLSVHQGGSGSPANEPPSSSEYPGSQQQAGKNQMQSVVQSAMAAKTTANGATVPPGCRHQLTPNGSSGRGSREAEDPATKAHMKAMAAKALWKLARGHVGVCKSITESRALLCFAKLLEQGDGGAGTDLQFYSAMAIMEITRVAEHNLALRQSAFKPSSPAAKAVVEQLLRIVCKGDVDDLLRPCITSLGCLSRTFTASETRVVRPLVELLDERELPVTKEAVVALTKFACTENHLHVSHCKAIVDGGGARHLVQLVYLGDQVQIEALILLCYIALHVPENEELAQAGVLAVLLWASKQPHMVQDLRVDALLPDAKGRLELFQSRASR

SEQ ID NO: 53302 - protein, 120 aa, Oryza sativa; identical to SEQ ID NO: 38214

SEQ ID NO: 53303 - protein, 252 aa, Oryza sativa
MRHFLCVGMLYNTNTAQKDDGAPSLPVGQIAYDSGYGAAQGRTPPAGLGDSLSGNPAGTAPRTGFDPSRGNMYDASRIASFSSSKAGGHDASRGAAGYNSLKGAGYDPSKAPALGGQATAAAAHGSSADYYGSNQATPPSYAWGQAASAYGSAQVPQSHASGPPVQSTSYSATTARNFGSAQALPSYAHAQEQPSYGHAQLPSSYGLAQASFPFAPAQGVSPYGSGAQPPQYGAGQAATNPGSAYQAPHGRK

SEQ ID NO: 53304 - protein, 469 aa, Oryza sativa
MPDKELDKTHAGPDKKNRPKDVFGRPLPTEQEFEVLKNAPRLETGAPARVKPFGVEVRNVRCLRCGNYGHQSGDRECPLKDVIMPNEESRLKRDDPLTAIMAQTDSSEPLKWELRQKPGMSPPRGGYNPDDPNQQIVAEDIFDEYGGFLGGCDIPALLSNFSASKSKKRSKSKSKHRQAEPAAHEESSHSEAEKSNRTSRSKRKKEYCSDSSFSGAEVEARKSKQKSKHKKKHLPESLSDSKVEVGRDTRRHQKREHRKKKRNITESESSSDSEVDIDTRKHPKREHRKKKRDVTESYSSSDSEVEVDRDTRRHPKREHRKEKRNMTENGHSSRSREKHHYSDTSTSDNEKHSMGHKDEQYYSDSSSSRSNRHSRRSREKRYYSDSSSPEHNRHSGRSKEKRAYTDLSTHDRDRHSKRSRDKREYTESRPYESNKHSRTLKVNWHYSDSSASDYSNSERHYSHRHRRRK

SEQ ID NO: 53305 - protein, 284 aa, Oryza sativa; identical to SEQ ID NO: 32471

SEQ ID NO: 53306 - protein, 513 aa, Oryza sativa; identical to SEQ ID NO: 31354

SEQ ID NO: 53307 - protein, 336 aa, Oryza sativa
MSNPESDPPPPSATSCPPPGSAAHAGHAPLCRSCGAPTTTPVPPPWSASSDSPPPAYRPIRMPAINAPTNTAAIVLSPVPQPLPVPPASPPFAFQVPAKRITSPDDIARFHASVHGRHFLGFVAALSASVHGRKLSDPLPSPPSPVVSALLELISALSAFVASTPPLPHNSRYGNPAFRLWHEKLSDSANQLIAPIMATAGSPDLAGAEAELAPYLLDSFGNATRIDYGTGHETNFAAFLYCLARLGLITEADYPAVVLRVFAAYLDLMRTLQDTYLLEPAGSHGVWGLDDYHFLPFIFGAAQLIDHKYMKPKSIHNPDILDNSQRSICTSHALPM

SEQ ID NO: 53308 - protein, 1207 aa, Oryza sativa
MLGLAHLSVMYIGPSLVDRFVNFVRRGGALTEGLQLVVVLLAGKAAEALASHHYEFQGQKLGMRIHAALLAAVYRKSLRLSTGARRAHGAGAIVNYMEVDAEEVANVTHELHNLWLMPLEIAVALTLLYTHLGPAVLTAVAAIAVVTVVVALANRRNLEYQFKFLGKRDERMKAITELLNYMRVIKLQGWEETFGGKIHELREAELGWLAKSMYFMCANTVVLWSGPLAMTVLVFGTCVLTGVTLDAGKVFTATAFFHMLDGPMQSFPEAIASVTQATVSLGRLDRYLLDVELDDTTVERVDDAGINPDGVVVEVRDGVFAWDVRGKKENEEGDDNEDDEEGEEEEEEKDVEETPVLETVLKGINIEVRRGELAAVVGTVGSGKSSLLSCIMGEMDKVSGKVRICGSTAYVAQTAWIQNGTFQENILFGQPMDAERYKEVLRSCSLEKDLEMMEFGDQTEIGERGINLSGGQKQRIQLARAVYQNCDIYLLDDVFSAVDAHTGSSIFKECLRGMLKGKTILLVTHQVDFLHNVDNIFVMRDGMIVQSGKYDELLDAGSDFLALVAAHDSSMELVDQSRQVVKTEYSQPKAVARIPSLRSRSIGKGEKVLVAPDIEAATSKIIREEERESGQVSWRVYKLYMTEAWGWWGVVGMLAFAIVWQVTEMASDYWLSYETSGSIPFNPSLFIGVYVAIAAVSIILQVIKSLLETILGLQTAQIFFKKMFDSILHAPMSFFDTTPSGRILSRASSDQATIDIVLSFFVGLTLSMYISVLSTIIVTCQVAWPSVIAVIPLVLLNIWYRNRYLATSRELTRLEGVTKAPVIDHFSETVLGATTIRCFKKDKEFFQENLDRINSSLRMYFHNYAANEWLGFRLELIGTLVLAITAFLMISLPSNFIKKEFVGMSLSYGLSLNSLVYFAISISCMLENDMVAVERVNQFSTLPSEAVWKIEDHLPSPNWPTHGDIDIDDLKVRYRPNTPLILKGITVSISGGEKIGVVGRTGSGKSTLIQALFRLVEPVQGTMIIDGIDICTLGLHDLRSRFGIIPQEPVLFEGTIRSNIDPIGQYSDAEIWRALEGCQLKDVVASKPQKLDALVADSGENWSVGQRQLLCLGRVILKRTRILFMDEATASVDSQTDATIQKITRQEFSSCTIISIAHRIPTVMDCDRVLVLDAGLVKEFDSPSRLIEQPSLFGAMVEEYANRSSNL

SEQ ID NO: 53309 - protein, 885 aa, Oryza sativa
MAHAARPLGGRARNPSPGPARPPPPFAAADAAAAADLRDAPRRVARMKDRACATCGDKIDSGNVIRCQCKKSPEHAKHEIHHTNDAMLEAKGFAKPNSSNKYGMHKSSGGTYSKPDARVKIIPAEEITYVRHGKLCGKTVGSDGLQKRQRRRSVTPPPSSRKVSLVTPTVVNQRPTPPVSPAASRISPNRPGTAKNVHSVVTSCISPNLTGKAENGHSLATSGISPNCPGAVKKIHSLATSPISPNWPGAVKKIHSLATSPISPMWPETAGNGHSLVGGYITNSFTTQIAYLSQRPSPFCRAVLSQPSGTPLGTDATAPKNLSRSGNREAYVKSCSSRTRTFSSAHAHSTVVPPGTNAEPSAESFCAPGNEKSSPMSCKLGTLQCQGTRTAVAPSVQKKLTMEPALPSPKSVLSEKSNEAYPDTDPRPSSRPNLFDTKCKVGSPQSETIIPPSQSPQSTSHARCVEPPDDFEAVPSTKSHIITEKQMNQEAPINCNVSSGIPVILHTKLHKKHYQPEACWKGKFEVTGELTHICDGLEAHFPFEISAQVYEASKQMPEILKLEARPLSHLWPKTFKMKPPEGQDIGLCFISSLQRPNGSSDHLLKNISSHIGLRTKIGATELLIFSSKLLTQEYQRKCDKFYFWGVFRALHRSYNQTSMSFDATGCKEIERHKNKETGKILETQDKKTEKEKCGEIGNKLDSAVSRERDRINECMRMLTPDPNAAASSSDFTCQSAPRVPAGSDLVLDTPPGFPHDDPPGLTKAHCLLHTGETTEPYIDSSPSLNLGVPPGLSLDIPPGFMKAHYLPHTGETTESHINPSHSHSLSWDTPLGFSLDVPPGFTKAHRLPIVSTAGSETVVSEKKPLIKFTLNVPRVAQTEAIPGIY

SEQ ID NO: 53310 - protein, 688 aa, Oryza sativa; identical to SEQ ID NO: 45760

SEQ ID NO: 53311 - protein, 631 aa, Oryza sativa
MDPRLGRSAFINFSNPNAYVGKFPVISTVSHPTASSQIDVLAHCSSYNLPRGTKRKFDGLSLGLGNSSSSESSKQSMGTGCTISSAKGSDDGSSIDLDLNHFTLGNEGTSRLDKRACDSRRALDKPELNLELSLSSQSAITGADFTAATEYNSPSLQPYYMDLVPTVDEGSTSARRPSGCQVLSFLNKTAKMSEFSPREVFPGSSNQSQGPAPMPTLLQLPKSPVACTSGLSRPQQRSSSTKNCTYPGCMKGARGSSGRCIAHGGGRRCQKDGCDKGAEGKTIFCKAHGGGRRCEHLGCTKSAEGRTDFCIAHGGGRRCSHEGCKRAARGKSGRCIKHGGGKRCQHAGCTKSAEGRSGLCIAHGGGRRCQQDGCGKGAQGSTNFCKAHGGGKRCTHPDCKKGAEGSTAFCKGHGGGKRCSAEGCTKSVHGGTLCCVAHGGGKRCVVEGCTKSARGRTDRCVGHGGGKRCQSSGCDKSAQGSTNFCKAHGGGKRCLWGHEGSDHGAGDTPCERLARGKNGLCVYHNPQVDENRVHGGFSVVSDALSQGDRPSNTETSRCSIFSHPMEAPRRVAAPADEGRVHGGNILSMFANGMSLGRHPANQAEASTSAPRNSKSTNGMVTGNSAVRGSWL

SEQ ID NO: 53312 - protein, 1018 aa, Oryza sativa
MMTVPMDKATASPSSRELAQRLLKKNAEHESRLRRSAQSKVPSDPNIWFQMRENYEKIILADHDFSEKREIEYLLWQLHYKRIEEFRAHIVSAGKNNANPDRIKRIRSSVRSFLSEATGFYHDLMLKIRSTYGLPLGYFSEGPDSSVVPDKDGKKVVGVKKGLLSCYRCLIYLGDLTRYKGLYGDVDYASREYAAASIYYKEAASLCPSNGNPHHQLAILASYAGDEVTAIYRYFRSLAVDNPFSAARENLILAFDKFHMQNHDIYAQLSGNSKVPNAKSLPSRSVGRARGRGETRFQPKGSSTEENSKEREHSIQEILKAFYIRFVRLNGILFTRTSLETFGELSATVISDLQILLSSGPYEELNFGVEAAENALSVVKLIAILIFTVHNANKDADNQSYAEIVQRRVLLQNAFAAAFEFVGYLLKRCAELHDVASSIYLPAILVFIEWLACHPDFVASSEMDEKQADARSFFWSQCVPFMNKLILTGLAHVDGDNDETCFFDMGTYEEGETGNRLALWEDVELRGFSPLVPAQGILDFSTKQGFGSDGGTKEKKARVERILAAGKALLNFVQIDQLRIYFDASSKKFLMASEPPPPASSVPLVVSSNAQTTNHIQQEPEVSSKIGSVAEDLGVLQSKAQLFLDGDDDEEIVFKPPVSEKLPRVTSEQTSNELLQPVVVSDVNWSNDGAPPPMTFQSNGPVLTPNVYVQSLPISSLGWAANAGQHVILDVGARSTSDIFESLKAPDHNWVSTGAPLVGSLDTVPMASFSNIISDQRTPPSSLGCFSNPDNTAILPGQDSFLLSALNNVNIGASGFLDQRVNGGLSGLQSVGNVPQVSAQATMNSTNPMIGQYKHTEVTIPSAFYSVLPSVVSSDGVSKKNPVSRPGRHVGPPPGFNNAPPKRQDDSILAGNGQHVQTNDGIWLDGYRSSLDYVNNQRFAHSNVTTASSTFTTPFPFPGKQAFSMHPRGSDEKQWQDFHLFGPTKQLPELNFQQGNQQNGPLAEQLPAQSAWSGNYLV

SEQ ID NO: 53313 - protein, 479 aa, Oryza sativa
MSSSATVVPLAYQGNTSASVADWLNKGDNAWQLVAATVVGLQSVPGLVVLYGGVVKKKWAVNSAFMALYAFAAVWICWVTWAYNMSFGEKLLPIWGKARPALDQGLLVGRAALPATVHYRADGSVETAAVEPLYPMATVVYFQCVFAAITLILVAGSLLGRMSFLAWMIFVPLWLTFSYTVGAFSLWGGGFLFHWGVIDYCGGYVIHVSAGIAGFTAAYWVGPRAQKDRERFPPNNILFTLTGAGLLWMGWAGFNGGGPYAANSVASMAVLNTNICTAMSLIVWTCLDVIFFKKPSVVGAVQGMITGLVCITPAAGVVQGWAALVMGVLAGSIPWYTMMILHKRSKILQRVDDTLGVFHTHGVAGLLGGLLTGLFAEPTLCNLFLPVADSRGAFYGGAGGAQFGKQIAGGLFVVAWNVAVTSLICLAINLLVPLRMPDDKLEVGDDAVHGEEAYALWGDGEMYDVTKHGSDAAVAPVVV

SEQ ID NO: 53314 - protein, 459 aa, Oryza sativa
MESSNLGGGGGGGGGGGPPPFLIKTYEMVEDAATNHVVSWGPGGASFVVWNPLDFSRDLLPKYFKHNNFSSFIRQLNTYGFRKIDPERWEFANEDFIRGHTHLLKNIHRRKPVHSHSLQNQINGPLAESERRELEEEINRLKYEKSILVADLQRQNQQQYVINWQMQAMEGRLVAMEQRQKNIVASLCEMLQRRGGAVSSSLLESDHFSKKRRVPKMDLFVDDCAAGEEQKVFQFQGIGTDAPAMPPVLPVTNGEAFDRVELSLVSLEKLFQRANDACTAAEEMYSHGHGGTEPSTAICPEEMNTAPMETGIDLQLPASLHPSSPNTGNAHLHLSTELTESPGFVQSPELPMAEIREDIHVTRYPTQADVNSEIASSTDTSQDGTSETEASHGPTNDVFWERFLTETPRSCLDESERQESPKDDVKAELGCNGFHHREKVDQITEQMGHLASAEQTLHT

SEQ ID NO: 53315 - protein, 132 aa, Oryza sativa
MYISLFLVWKADPSKAASKTTYSSYPSTTKSGSSWTVPSYKDRSDLPTPRTEGEILSSSNLKAFTLSELKNATKNFKPDSLLGEGGFGYVYKGWIDEQTLAPARPGSGMVVAVKKLKPEGFQGHKEWLVRLL

SEQ ID NO: 53316 - protein, 143 aa, Oryza sativa
MSFAMLEHLTEALLFPELKEYWFVSYVGLVMVIIGEVIRKLAVVTAGRSFTHVIRIHYEDQHKLITHGVYRLMRHPGYSGFLIWAVGTQVMLCNPLSTVAFTLVLWRFFSKRIPYEEFFLRQFFGREYEEYAQKVHSGLPFIE

SEQ ID NO: 53317 - protein, 1019 aa, Oryza sativa
MESYLKENFGGVKAKHSSDEALGRWRRLVGVVKNPKRRFRFTANLDKRSEAAAMKRSNQEKLRVAVLVSKAALQFIQGLAPASEYTVPDDVKAAGYGICAEELSSIVESHDIKKLKSHGGVEAIAAKLCTSPEDGLPKSRRRQAVREELFGINRFAETESRSFWVFVWEALQDMTLMILAACAFFSLVVGIATEGWPKGAHDGLGIVASILLVVFVTATSDYRQSLQFKDLDKEKKKITVQVSRNGYRQKLSIYDLLAGDIVHLSIGDQVPADGLFLSGFSLLINESSLTGESEPVAVNAENPFLLSGTKVQDGSCKMLVTTVGMRTQWGKLMATLSEGGDDETPLQVKLNGVATIIGKIGLIFAVVTFAVLTEGLFRRKIMDASYLSWTGDDAMELLEFFAIAVTIVVVAVPEGLPLAVTLSLAFAMKKMMNDKALVRHLAACETMGSATTICSDKTGTLTTNHMTVVKACICGKIKDVESASDTKSLFSELPESAMTLLSQSIFNNTGGDVVFNKSGSREILGTPTETAILEFGLSLGGDFLAVRKASTLVKVEPFNSAKKRMGVVIQLPGGAMRAHSKGASEIILASCSKYLNDQGNVVPLDDATVAHLNATINSFANEALRTLCLAYVDVGDGFSANDQIPEDGYTCIGIVGIKDPVRPGVKESVAICRSAGIMVRMVTGDNINTAKAIARECGILTEGGIAIEGPDFRTKSAEELNELIPKIQVMARSSPLDKHTLVKHLRTTFDEVVAVTGDGTNDAPALHEADIGLAMGIAGTEVAKESADVIILDDNFSTIVTVAKWGRSVYINIQKFVQFQLTVNVVALIVNFSSACLTGSAPLTAVQLLWVNMIMDTLGALALATEPPNDELMKRTPVGRKGNFISNIMWRNILGQAFYQFIVIWYLQTEGKWLFGLKGENSDLVLNTLIFNCFVFCQVFNEVSSREMERINVFEGILDNNVFVAVLGSTVIFQFIIVQFLGDFANTTPLTLKQWFNCIFIGFIGMPIAAAVKLIPVDF

SEQ ID NO: 53318 - protein, 744 aa, Oryza sativa
MAGRRAMRPSGSSMRGVVARLAAARSPAVSFLVAAAAGAALVGGVYFWLVVSSFRLPDSRAVGCLPDGEGSWAIGMYYGKSPLELRPIELEGRSNGNSSAWPVANPVLTCATPTEGGYPSNFVADPFLYVQGDTLFLFFETKTVSTMQGDIGVARSLDQGATWEFLGIALDEAWHLSYPFVFKYENEIYMMPEGNKKKELRLYRATKFPLEWTLEKVLIDKPLIDSSLVQYDGLWWLFASDFTRHGIEKNAELEIWYSNSPLGPWSEHKQNPIYRSDKSLGARNGGRLFIFEGSLYRPGQDCSGTYGRKVKLYKIEKLTKEEYKEVPVNLGIEEAKKGRNAWNGMRYHHIDAQQLASGGWVAVMDGDRVPSGDSTRRSLFGYMGFLVAVALVTFVGFVKGAISCYIPPSFWVPLTRRSELSRILPVHRFNLKIRRYSTSIGRNISATKARLSEKTWSNTLFFCVIALIGIVNVCIAVHFLLGGNGAEEAYTHQGQHSQFTMVTMTYEARLWNLKLFVEHYSRCESVREIVVVWNKGNHPTSDAFDSTVPVRIRVEEINSLNNRFRGDPLIKTRAVLELDDDIMMTCSDVEKGFKVWREHPERMVGFYPRMIDGDPLQYRNERYARGKKGYNLILTGAAFMDSEFAFSKYWSQEAKEGRDYVHKNFNCEDLLMNFLYANASSSRTVEYVHPAWAIDTSKLSSVAISRDTQKHYDIRTKCLAKFASIYGPLPQKWLFGMREDGWDK

SEQ ID NO: 53319 - protein, 426 aa, Oryza sativa
MPDLPTMDDDDDKMGTHAQVQQLPDELLLEILLRLPPRAIARCLAVCSAWSSAVSAAAFRRAHADRPAAVCKATATAIDCCDRDAVVLDAFLGRWHRGNVHTTPRSPRGLVFPAAMAPEPDTPWVLDTLVVGSWDGVLCVERGAPLLRGSRWDAGVHHWPKSGRLREYVLWNPLAMTRATVSPPPGRGAVIGGYAHPATMRFHLLHAAGEAARRPGSLGLFVPTVFRVQRVGDGAWREVPLPLLEQQDDHAHAQLQMHGARSVALHGNLHWLVQRGGSAGPGRLQVLVFEPARERFRLMEAPPRRHGEEDDLARSRIVVLSNGKLCAVAVRPATSTMEMWVLDSSSSDAPRRWRLDAYSLRRRKWTRVCAARPRSGSVGVALLPHRESVADDQPSFGEASRLLDHTIDIDVDDQYLSMNPITLFCY

SEQ ID NO: 53320 - protein, 129 aa, Oryza sativa
MTALQIRAPPASSSPPAPAASPPRSLRRRPRRATTTALQIRAPPSSLLAPSAAGHDERRRRLASSTVGFPPRYLRHWPRRATTTARIRLPALLIDATTTTMAAPTATDGGEPKPAALVVRLAAVPRGFF

SEQ ID NO: 53321 - protein, 398 aa, Oryza sativa
MPSTSRQSLDYLCKMFGLVTTYHRALVNGGYCYGPFSCVTNIIVNTLWYDSTFPAMEKLEVDMICTSTFVRVESRSLRGLIKLLLTCIPEISEHDAMIYLLKNNLKVRKAIEMAGAEGWKSSWDVSAYKAAADASFHPEPEAYVQFSTQSLPKVQAAVKSLLRASTPLSSNDVLQLATLLPSSNCISAKSLETIVDLSTDALDMFIAFKEKFVTQQGFFHRKIEAALRKRGYLYDLQVICVANERVGSQMNFLDFKCPYSHVNFLARPKVGSGLKLFFAEFSNDDDDVSFCCTVSRKSKHARCCYCEYEGTRIMHPAHPIENYCGGDMDFIEMAHGTHKLTNARIISCGKCAGNRVGMCGDDYIYFDPTRDAKFAQCMNRTASRANISWSDILKVNTS

SEQ ID NO: 53322 - protein, 495 aa, Oryza sativa
MGRNHLCLVTCLWILSCAVLLHASPDGLLRISLNKKRLDKKTLDGAKLAREESHRLRADGLGDDIVPLDNYLDTQYFGEIGIGTPPQNFTVIFDTGSSNLWVPSVKCYFSIACYLHHRYKSKGSSSYKKNGESCSISYGSGSIAGFFSEDSVLVGDLAVKNQMFIETTREPSLTFIIGKFDGILGLGFPEISVGGATPIWQGMKEQQLIEKDVFSFWLNRDPDAPTGGELIFGGVDPNHYKGSHTYVPVTRKGYWQFEMGDLLIDDYSTGFCSGGCAAIADSGTSLLGGPTTIVAQINHAIGAEGIVSMECKQVVRDYGDMILEMLIAQASPMKLCSQIGLCAFDGTRSVRNNIESVVDKEKVGSDLSCTACEMAVVWIQNQLRHNQTRELILQYAGQLCERLPSPNGESAVDCDEISNMPNLSFTIANKTFTLTPEQYVVKLEQQGQTVCISGFMAFDVPPPRGPLWILGDVFMAAYHTVFDFGKNRIGFAESA

SEQ ID NO: 53323 - protein, 76 aa, Oryza sativa
MEGAVLVLHQVAILALPAAETEAAIAAAPRRRFCERCELHIHIQGRGCSEEVHPWSMRTGRGGNRAAGQGKIPSLF

SEQ ID NO: 53324 - protein, 1084 aa, Oryza sativa
MVAAKVSTPAGGAVRDGLRRLTQLSLVSKVCSELEAHLGVGDRVLAEFIVDLGRASPSVADFDAKLKAHGADLPDYLARTLHTVIHAIPTHADDAPAPAPQNPASRGTGARVCGKDKAEERVRDGDPGLYQVCRGKVTGLADAGCFVRLDDARGREGLVHVSEMPGRRIAVKRGQEVFVKIVSVQGRNLGLSMRDVDQDTGKDLLPLQRARGEDDVPRPMANPWTDRAAATRRRTGVSGIVIPEDNQTGTASSRRPIRRMSSPERWEMKQLIASGVLNAKDYPAFDDEDSEGMNYQEEGVEEELEIELNEDEPAFLRGQGRSTIDVSPVRISTNPDGSLSRAAVLQSALIKEWRDIRNEDQRALVDSIPKDLNRPWEDPVPEVGGRYLAQELRGVGLSAESMPEWKKEAYGKTVTFGQTSRLSILEQRQSLPIFRLKNELIEAVRDNQVLVVIGETGSGKTTQVTQYLAEAGYITRGKIACTQPRRVAAESVAKRVSEEFGCRLGEEVGYSIRFDDHTGPDTVIKYMTDGMLLREILLDTDLSSYSVVMLDEAHERTIYTDILFALLKRLIRRRTDLKLIVTSATLDAEKFSGYFFDCNIFTIPGRTYPVEILYSKQPESDYMHAALLTVSQIHLTEPEGDILLFLTGQEEIDHACQCLYERMKSLGRNVPELLIYAVYSAQPAEMQSKIFEPTPPGKRKVVVATNIAEASITIDGIYYVIDPGFAKLNVYNPKQGLDSLIITPISQASAKQRAGRAGRTGPGKCYRLYTESAYRNEMPPTTTPEIQRINLGETVLNMKAMGINDLLSFDFMDPPAPQSLITAMEQLYNLGALDEEGLLTRVGRRMAEFPQEPPLSKMLLASVDLGCSDEILTIIAMIQTGNIFYRPREKQAQADRKRGNFFQPEGDHLTLLTVYQAWKAKQFSGPWCYENFVQLTSLRRAQDVRKQLLEIMDKYKLNVVSAGNDLTKVRKAITAGFFFHAARKDPQGGYRTIADHQQVYIHPASALFQQQPEWVIYHEVVMTTKEYMREVTAIDPRWLVELAPRFYRSADPTKISKRKRQERIEPLYDRYNEPNSWRLSKRRG

SEQ ID NO: 53325 - protein, 800 aa, Oryza sativa
MEKVEVDGNFIGTGNWKLHGALCKQLHKVVLEVLDVIPVLEATRPGNSSGLLALSSLRIAVEKAKNLLQYCSECSKLYLAFTAENVLAKFEKARYALLESLHQLEETLPEAASSQILVIAKDLEKAVFTLDLIEKQAGVDVNQLVQNEAKSNGFLHDNELEFFRQTAFRVGVASSATALTERRALRRLLERAHAEEDIKKESVASYLLHLMRKYSSIFRSETTDFTNTSMCSSPSCSSRSLSSSIDLHGNGHVIEKSISRVGSFNLRQIKGLSGSMPLPPEELRCPISLQLMHDPVIIASGQTYERACIEKWFSSGNTTCPKTRNELSQLSMTPNYCIKGLIASWCEQNGVLVPSAPPDSPKLKYLRISSLNSSKCLVTNGVSTVLFEDTCAEDDIKDGGKVASEECTRQNSGEAPSEICEVDQASPEKHPHENSEKVAEATCELWLRVLSKDDDECVDEQREVIEQIRFLLKDDNELRKYAGANGITELLIHFVKKAVCRDDVQCQVVGTMALFNLAVSNDRNKKQLLSGGVLPLMEQMIQKPETYEAAVAMYLNISCLAEAQVIIGQSEAAPLLIKGLQGDGFRMSKTCCLDALLTLYNLSLQSSNIPTLISSGIMQSLHDVLTPSSPTTEKALAVLINLALTRAGKKEIMADSDMVGAIVVILENGDPAEKEKAVSCLWIICSGDDGGSQMVLQEGVIPALVSLTANGTGKTKDKAQRLLLLFRGKRQREVEQLQPRVQLHEVVSQATAQHEQQQQQQQEESSEPGSDKMSRLRNSKSKLRRFTRALARLLKKWGIR

SEQ ID NO: 53326 - protein, 767 aa, Oryza sativa
MASRAVIRRRKYLLDHVNAPTLSLSPFSTFQHGRSGSEDESRIGQRFLERSSGDSKWEQGQHGVKLIKGDLLALGNGLLRRPAHGISLPAYGIGRKEFGLPMGARHLLQSVRTASTATAGQPKLDIEDEQSEDQKQNKRKKEASPEECDQAVEGLSSAKAKAKAKQVQESVKAGQSIVRKFWARLLGIGPALRAVASMSRADWAAKLKHWKDEFVSTLQHYWLGTKLLWADVRISSRLLVKLAGGKNLSRRERQQLTRTTADIFRLVPFAVFIIVPFMEFLLPVFLKLFPNMLPSTFQDKMKEEEALKRKLKARMEYAKFLQDTAKEMAKEVQTSRSGEIKQTAEDLDEFLNKVRRGEHVSNDEILNFAKLFNDELTLDNMSRPRLVNMCKYMGIRPFGTDHYLRFMLRKKLQDIKNDDKMIQAEGVESLSEEELRQACRERGHLGLLSTEEMRQQLRDWLDLSLNHAVPSSLLILSRAFTVSGKMKPEEAVVATLSSLPDEVVDTVGTVLPSEDSVSERRRKLEFLEMQEELIKEEEKKKEKEEKAKQEKEEKAKLKEPKAAEEDLALKEMTGPTAREEEELREAKQHDKEKLCNFSRALAVLASASSVSKERQEFLSLVNKEIELYNSMLEKEGTEGEEEAKKAYMAAREESDKAAEVDEEEKVSSALIEKVDAMLQKLEKEIDDVDAQIGNRWQILDRDLDGKVTPEEVASAAAYLKDTIGKEGVQELVSNLSKDKDGKIRVEDIVKLASQTDENNEDEEEGRQ

SEQ ID NO: 53327 - protein, 211 aa, Oryza sativa
MLPIASDRLTIHVPISTTSINDLILIIFSIICRSVTAPIKKGSNPPRRTNLNVLMSSKLVTSPLKSMEQGHLEQPLRDPQAPAEQHDMGLSPLTLLGFAFLTFNSGMAVYRSDRDLATIFFVVFSYVDLVSLFYFLRLFEKTPPESPRRHHIKTAVWLLTTMLTAVFSYKVAAIMPFPVQVLVWAMAAATVLGGFYAFFLHSDEKKPIEVT

SEQ ID NO: 53328 - protein, 704 aa, Oryza sativa
MMGPKANAAAVGDLPEYAEVDPTGRYGRYNDVLGKGASKTVYRAFDEYQGMEVAWNQVKLHDFLQSPEDLERLYCEIHLLKTLKHRNIMKFYTSWVDVSRRNINFITEMFTSGTLRQYRQKHMRVNIWAVKHWCRQILSGLLYLHSHDPPIIHRDLKCDNIFVNGNQGEVKIGDLGLAAILRKSHAVHCVGTPEFMAPEVYEEEYNELVDIYSFGMCVLEMVTFEYPYSECTHPVQIYKKVISGTKPEALYKVKDPMVRQFVEKCLATASRRLSARELLKDPFLQVDDLVFCPGDGDYSLMNYLRQPYLEHAYSNVSMMSNGLSESIDEDTPTEDRWDCEDDDIKADGIDLFNGHEDEPLGNVDITIKGRKSEDGSIFLRLRIADNDGHVRNIYFPFDIEADTALSVATEMVAELDITDHEVTRIAEMIDGEVSALVPDWRPGPGIEKSQDTTYCHNCGSNVSSCGSLYAYMSSAARGCQCAELHGRFEEITFQANGEQTDLQDSGGSSDDGGGQTQHVKDQEAVHSNGFVQMGRRGPRDQFCFSSFQEQSCSPRHYEYDTSLQAKGFDMKHEVKMAKYKARKMAHLRRAIHPSLDFDNLNGERRMKSSLNKLQSFHIGKNHNFRIPTCERSPGARDAEEDPDIFNLAYHSRHPDPGAQRARHCEVDAQSSPDLMFTARSYYTGAQLPTNLPRTKSVTLNAVDA

SEQ ID NO: 53329 - protein, 520 aa, Oryza sativa
MVFSHNKNSNQFDPLSYVNLSGLDADSQSVSFTDMNSRDAPSNSHVTDVGKENMLNNPEESKIASTGLKPGSPISPENFSFSSLPGSSCHLSTLDHGKRPLSDVRPFQVACKRPKQIDENTWSTSTFETSFSDLADETREPDYIYHNSGISACNTSSSIPYSNLEQLIGEENLYLPDWVTTFPGYTGDFWPAPVADQVDDIDSPIHDHLPRKAVAIGPDHQADIPEWRPRISMTVPYGSGSCADLSYSSVSTSGSAPRDEDSESDKWIKHCVIEMPSSCSVAWVGDHGRDCGCSDEGSIRCVRRHVLESRENLKRIFGEDKFRELGLCDMGEDIAQRWTDEEESLFYRVVYSNPPSLGKNFWHFLPRALPGKTSMELVSYYFNVFMLRKRAQQNRSEPLHVDSDDDEVPDEPSVTEDEDSAVESPAHDYYVNNPMSPESEDSFHEKVADSLSGLRDGPSQKPLGSNTDNPGGDADVQDESCTSFEDHNGAHGSNGVQCAEFHMMLPNAALDHYSDRGACM

SEQ ID NO: 53330 - protein, 67 aa, Oryza sativa
MVQNSGLRKTCFSVSPCTDNTIILPPQHTNLAMLPPASACPWLPAYKKKEYSFPVSVMHLAKKVGGQ

SEQ ID NO: 53331 - protein, 649 aa, Oryza sativa
MEPTGTIVFATVGVTNFGFDVFSAAVPLPPMEEDAERRHTDGVSVNFNAQFVDDGGEEVAFVSERGGAAGLFRCRPGPEQRAEPLPTVEGSLFHDRPTVRGGRLYFVSAHEQPPAPFRSWAAVYATEIGSKETVRVSPPGVVDMSPAVSDSGELVAVASYGDRPWAFDFRVLETEVAVFRAADPARRVVVVGRGGWPTWHGEGTVFFHRVADDGWWSVFRVDVSPETLEPTGGERRVTPPGLHCFTPAAVGRGGGGRWIAVATRRKGRAQRHVELFDLETESFSPLTERLNPELHHYNPFFSPSGDRVGYHRFRGAGARGDSVVPYLQPVQSPVSSLRMLRVYGTFPSFSPDAAHLAMNGDFFKTPGVTILRSDGAKRWVLTREPNLFYTSWSPAESGVIFTSMGPIFETTKATVRIARLEFDAGELTTGRDEVAATLKVLTRPEAGNDAFPAVSPCGKWVVFRSGRSGHKNLYIVDAAHGEDVGAGEGTIRRLTDGEWIDTMPSWSPDGSLIAFLLQPPRPDERRRVQHLPGPARRLRAPPRPRRRAGGERGGGQGADQPRVLQPGLAVAAVHGQLRRRDGGAHLGAEPVPAVRRPVRVPARRLGVGQAHLQRLRERHAGVGPGELAGGGAGVAVAGPGRRGRVAGRV

SEQ ID NO: 53332 - protein, 506 aa, Oryza sativa; identical to SEQ ID NO: 37227

SEQ ID NO: 53333 - protein, 474 aa, Oryza sativa
MMGIQRICIVLGMLFILVREGGAVTFTFVNRCTGTVWPGILSNAGSARMDPTGFELPPGAARAVPAPTGWSGRLWARTGCTQDGTGKVVCATGDCGSGTLECAGRGAAPPATLAEFTLDGGGRNDFYDVSLVDGYNLPLLVEPSGALGATATTCAAAGCAADLNARCPAELRAVGGAACRSACDAFGKPEFCCSGAYANPNTCRPTAYSQVFKSACPRSYSYAYDDPTSTFTCAGGRDYTITFCPVATPSLKSAGGTTTPTTTVPGVTTDAPPDMARPIGSQGGGGGGGAGQGVMLGDNSWLASLAMGDASSSRRASRLALLAAPPRAAHAPPAAAIAADHVRENHPKFFWSKGQGDAGDVARLHGPPPVHQHIITTKSARTPKRCALRSLLLLPPRRRRQRVAVRSSGVFAGVVHGVGPASSVCGGDRVIRFGQDRRSAIVKSIRFFFFGFFFLLVCAFVSRRKEMYKINPTD

SEQ ID NO: 53334 - protein, 483 aa, Oryza sativa
MDKAEEGQSSEPADSAAPAQDDSVQTASGHNSRRPNLSLQIPARTLDNQIGTSARINISPSPSSTRAGLPPRPNSTRTKSSLKSIIPQQSFRARSSAQEGDRAILLVPGTPSEGQQDNTSTLRSFSFRKVINSLSAKRTHSLPVTPIATSDKTSSPANQINNLPTTDDQDVQARIRRSLSVPGNRKNRSLRRADSLGVIRVIPTTPRPIPVNTTASSDGIEETVDVPGDGGKDIPEEEAVCRICLVELNEGGETLKMECSCKGELALAHQDCAVKWFSIKGNKICDVCKQEVQNLPVTLLRIPTQTANRRVTNGAHQRASQQYRFWQDIPILVMVSMLAYFCFLEQLLVTDLLSHALAISLPFSCVLGLLSSMIASTMVTKSYLWAYASFQFAIVILFAHIFYNVLKVNPVLAVLLSSFTGFGIAISANSMLVEYLRWRSRRNQQLAQTVDDGQRQEPGSNAVNENNGDRQQAQHRESGDNIV

SEQ ID NO: 53335 - protein, 719 aa, Oryza sativa
MPPDWSRLGLEEALAAAALLLRSCSPRRAVLRRARAVHALLVVSCTPSSPALTTFLANQLLSLYARLSAVPDALALLRSTPRPSVVSYNTVLSALSRAPRHAPEGLRLFRRLHASGLRPTAPSLCALLRTAGELRDRRAGAAAHSQAATLGFLASDIVPTALLQMYSQCGAPRDANQVFDEMATRDGVAWNCVMHCNVRYGYLDRALGQFCRMVRGGLPPTESTLSSVLSGCGRAGDCLRGRVLHGWVVKLEELDPDMPLQNALLDMYSSCGDLDTALRVFERIETPDLVSWNTLIAGFSGVGDGCSAVHAFVQLKAVQFDERVVPDEYTLAAVVSASATLPAMFGGKPLHAEVIKAGLENSVFVGNTLLNMYFTNDDPHSARILFDSITQEDVIMWTEMVAGHSSLGEGELALRYFVSMLQEGYKVDSFSLSSALNSTTELAGLKQGEMLHAQVVKSGYEGNICASGSLVDMYAKNGALPGAYLVFRNIQRPDLKCWNSIIGGYGNHGNSEMAFKLFGEMIRDGLQPDHVTYISILSACSHCGLVEKGKFYWFCMMTDGIVPGFKHYTSMVSLLGRAGLLDEAVDLMMKSPFAKKCPELWRILLSSCITFRNLSIGVHAAEQALEQDPDDISTHILLSNLYASLGKWDFVAEIRKRMRGLMADKEPGLSWVEMKNVVHVFSADDECHSHIDDCHSELLRLKGNMELLDTCENEFMSSG

SEQ ID NO: 53336 - protein, 951 aa, Oryza sativa
MGGLEEIKNEAVDLENIPIEEVFEQLKCTREGLSSEEGNRRIEMFGPNKLEEKKESKILKFLGFMWNPLSWVMEMAAIMAIALANGGGKPPDWEDFVGIIVLLVINSTISFIEENNAGNAAAALMANLAPKTKVLRDGRWGEQEAAILVPGDIISIKLGDIVPADARLLEGDPLKIDQSALTGESLPVTKNPGDEVFSGSTCKQGEIEAVVIATGVHTFFGKAAHLVDSTNQVGHFQTVLTAIGNFCICSIAVGIVIEIIVMFPIQHRAYRSGIENLLVLLIGGIPIAMPTVLSVTMAIGSHKLSQQGAITKRMTAIEEMAGMDVLCSDKTGTLTLNKLSVDKNLVEVFTKGVDKDHVLLLAARASRTENQDAIDAAMVGMLADPKEARAGIREVHFLPFNPVDKRTALTYIDADGNWHRASKGAPEQILTLCNCKEDVKRKVHAVIDKYAERGLRSLAVARQEVPEKSKESAGGPWQFVGLLPLFDPPRHDSAETIRKALHLGVNVKMITGDQLAIGKETGRRLGMGTNMYPSSALLGQNKDASLEALPVDELIEKADGFAGVFPEHKYEIVKRLQEKKHIVGMTGDGVNDAPALKKADIGIAVADATDAARSASDIVLTEPGLSVIISAVLTSRCIFQRMKNYTIYAVSITIRIVLGFLLIALIWKYDFSPFMVLIIAILNDGTIMTISKDRVKPSPLPDSWKLKEIFATGIVLGSYLALMTVIFFWAMHKTDFFTDKFGVRSIRNSEHEMMSALYLQVSIVSQALIFVTRSRSWSFIERPGLLLVTAFMLAQLVATFLAVYANWGFARIKGIGWGWAGVIWLYSIVFYFPLDIFKFFIRFVLSGRAWDNLLENKIAFTTKKDYGREEREAQWATAQRTLHGLQPPEVASNTLFNDKSSYRELSEIAEQAKRRAEIARLRELNTLKGHVESVVKLKGLDIDTIQQNYTV

SEQ ID NO: 53337 - protein, 63 aa, Oryza sativa
MMVWELLQVSSWSCLLPQQVTIGNPYSSRTWTRRKRKYKCKSQGMVLDKGYQYMIFFLEMLSI

SEQ ID NO: 53338 - protein, 336 aa, Oryza sativa
MAARSGEVRATVLGMAVLALLLLLGHHAAAIEANVGVTRQASFSLNGGAGAGAGARAGAGAGAGAGVGAGIGANVGVGARAGVGAGVGAGVGAKVGAGVGAKVGAGAGVGARAGVGANVGAGVGAKVGAGVGVGAGAGVGAKVGAGVGVGAGAGVGAKVGAGVGAKVGAGVGAGVGAGVGAGARVGIGANVGAGAGTGVGAGAGAGAGAGVGAGARAGIGANVGANVGAGVGAGAGAGAGAGAGVGAGARAGIGANVGANVGAGVGAGAGAGAGAGAGVGARAGIGANVGANVGAGAGAGAGAGIGANVGANVGANVGAGVGVRANRQNSFSMNSA

SEQ ID NO: 53339 - protein, 775 aa, Oryza sativa
MSGAPCSNLGLVPRDMHGSIPISTTNSSGPSIGVSSLVTDANSSLSGGAQLQPIIDGPIVQQSPPQEQMQKRRSSSVTSQPVIDAAGALHAQKKSRVDIRQDDILQHNLIQQLLQGQSSLHLQGQQNPQIQALIHQHKLAQIQQQQQHQMLQPFSQIQQSQVGIPRQPQLRPPLAQPGMQLAGPVRTPVENGLCSRRLKQYLYHKRHRPENNPITYWRKLIDEYFAPRARERWCVSSYEKRGNPSGAVPHTAPDSWRCDICNTHGGKGYEATYEILPRLCQIRFDHGVIDEYLFLDMANEFRLPNGLMLLEHTKVVQKSIYEHMHVIHEGQLRIIFTPELKIMSWEFCSRRHDEYITRRFLSPQVAHLLQVAQKYQTVATESGPAGVSNSDAQNICNMFVTASRQLAKNIDHHTLNEHGLSKRYVRCLQISEVVNHMKDLIEFSHKNKLGPIEGLKSYPKQTAAKLPVQNMHEPKQLMAAAGLPNDQTNLKAMGVKTEMNTHANETHGIGPIGNGPQNAAALNNYQNPIGNGLQNAAALNNYQNILRSSVANQSLLQQEASSMFKGPTAMHNGIQLEASRSFRGPNQVHLAQFQHPASFQQPMPQQSSLQGLGVSPQYQQHVLHQLLQEAKNTNNRVLAQQQQQQQLQHAPANSGLASGGTAITGSAASGDHMNNNGAVKGGTPMVTTGPSSVINNTASILPSRSNSFKSVSSNPQVAAAAGGGIGSGGHAATPKADALHELDDLDNLGNLISTELEESGLFLGDQAGGGYSWNM

SEQ ID NO: 53340 - protein, 780 aa, Oryza sativa
MRGVESGGGGGGASSSSPAAAGNFDAGQYAFFGKEPLEGLELSCLEDGGGDGNGGGFSGPEDGLYRLSSVGEEIDNLSNLSEIDDLASTFAKLNRSISGTRNPGVIGDRRSISRGSSLTVDWAEDAEFPNWVDQDILEGEELQESKRWWSQSRSLGQQGDAKPLSRTSSYPQQPLQHRASEPIIAPQSPPFTSFPPPGARSPYTAQGLTRHGSIPSVGAGLQMGSPSMSLPSSSYHMAGLSHGLPYGGSVSFGSPNLPGSNPIQNDWPNQANPYAVDQFNLLPNMLQKQISLPNSPMSSLLFSQQQQRLAQVQVQPSHQNYLNLPPHLFYQHHSPELTGRFDSISNVPSLRDKRSRSGRGKHSTRFSQPLTDTGSQNGDSGGLKFRSKYMSSEEIESILRMQHSASHSSDPYVVDYYHQACIAKKGASSRQKANFAPTSMKDLPSKSRSSSDHHAYLQVDALGRVSFSSIRRPRSLLEVDLPSSGDGSHDQKSSLRPLEKEPMLAARVTVEDAICLLLEVDDIDRLLQSSQAQDNSFQLRRRRQVLLEGLATSLQLVDPLGPSKSSHSSGLAPKDDLVFLRIVSLPKGRKLLSRYLRLLTPGSELTRIICMAIFRHLRYLFGGLPSDSSAAETTVALAKTVSSCVLHMELGALSACLAAVVCSSEQPPLRPLASSAGDGASLIIKSVLDRATELLTDHHAAASYTVSNRTLWQASFDAFFGLLTKYCLSKYESIKQMFVMQSPCSVTGSEVSKATSREMPVELLRASLPHTNDQQRPAAA

SEQ ID NO: 53341 - protein, 334 aa, Oryza sativa
MADASSRTDTSIVVDNDDKNHQLENGHSGAVMASNSSDRSDRSDKLMDQKTIRRLAQNREAARKSRLRKKAYVQQLESSKLKLAQLEQELQKARQQGIFISSSGDQTHAMSGNGALTFDLEYTRWLEEQNKQINELRTAVNAHASDSDLRLIVDGIMAHYDEVFKVKGVAAKADVFHILSGMWKTPAERCFLWLGGFRPSELLKLLANHLEPLTEQQLLGLNNLQESSQQAEDALSQGMEALQQSLADTLAGSLGSSGSSGNVANYMGQMAMAMGKLGTLENFLCQADNLRQQTLHQMQRILTIRQASRALLAIHDYFSRLRALSSLWLARPRE

SEQ ID NO: 53342 - protein, 786 aa, Oryza sativa
MNGELKLMASYVSKLKFILQKDQQQEPHTANLLVLLGSSNQDKRNGLSQGENRMDTCTRKKPRRYQLLTMQQKETLNRAFQSCPNPDRNDLKKLAKELNMTETKIKYWFQNCRTKMKKFKNNEERKLLQKENEELKKENAELRNRMKNSTCRACDLPLFHIDCRHWENPMLNKGNHGVTSNLIPQAVSSLLPSSSGFVASGSNLSSNAVLMPVSAMPSSVLQPAPAVSGANFPILHNLSANANDGYTEKNVLLDLANRAMEEFFSLMKENESLLVKKKENGPLWLPHMDILGVESLNYQEYLAKSRTIGQKPVDFKVVVTRDTAIVNGSCVDLVKSLLDANRWRELFPGIVASANTTKIISTGPSNLHDGLLQLMRAELQVMSPEVPVCDVTFLRQSVQFGSGLWCVVDVSIDTILPGESKTAQSSVQTSSTAARRMEVRLLPSGCVIEEMENGYSKVTWMVHAAYDERAVPVLYHSLLRSAKALGACRWVASLQRHSQFLSGLHKYIFCPDSTMTEVVMRRKVLYLVKQMTSSFTGLFASMSKATLQDGDDTHFAHQIVGGATGEPAGLLLSATTTIWLPGVNPRHVYDHLRDEQCHGEWRCLLGEQLHQGNALPYGAPLNGETVPEFYRMVNGLHEGHAISLISPREMGGNISNTLLLQEARTDLSGSLIVYARTDVNTVHSIMNSGLNPATVFLVSSGCAILPDCLESFPLHPAATADQAGTSSAAIASRSETGGSFVTVTYQMFFSSQGGAAPASSSIHQGRDALKKATDIFKVVLDTLTVA

SEQ ID NO: 53343 - protein, 356 aa, Oryza sativa
MAPWCPADSTKPVFVGIYGAVIGGFAVSALFFLLSSFSSLAAPPLPIPPASAAAANLSGAVSGVAQPETMYNRPIWKPPPRRERMPAPRAFRLTREMVGARARGGAIVVTFGNHAFLDFILTWVRHLTDLGVDSLLVGAMDTKLLRELYLRGVPVFDMGSRMATEDAVWGSPTFHKMGREKVLLINALLPFGYELLMCDTDMVWLKNPLPYLARYPDADLLTSSDQVIPTVTDDSLENWREVTGAYNIGIFHWRPTEPAKRLAKDWKDLLLSDDTLWDQNAFNDLIHKKFGYPVVGEDELVYSYDGKLKLGVLPASIFCSGHTYFVQLPGHVSAASARTICCAYYFPVCRYCGKAS

SEQ ID NO: 53344 - protein, 898 aa, Oryza sativa
MAVGIHATLRACTRNRAMCSSSGLLPVLLDSAEKLLIGMGRASSWDGTPLLHCIQLLGGHSLSVKDLHSWLGLVKKALGTSWATPLMLALEKAMGSEEARGPAATFEFDGESSGLLGPGDSRWPFSNGYGFATWIYIESFSDTLSTATAAAAIAAAAAATSGKSSAMSAAAAASALAGEGTTHMPRLFSFLSSDNQGVEAYFHGQFLVVESGGGRGKKASLHFTYAFKPQRWYFVGLEHTNKHGLLGKGDSELRLYVDGSLHESRPFEFPRISKPLAFCCIGTNPPPTIAGLQRRRRQCPLFAEMGPIYIFREPIGPERMGRLASRGGDVLPSFGNGAGLSWRATNDHVKNMAEESFTLNQQIGGCLHLLYHPSLLNGRLCPDASPSGSAGTHRRPAEVLGLVHVSSRVRPAESLWALAYGGPMALLPLTISNVQMDSLEPMLGELSIATASLSAPIFRIISLAIQHPGNNEELCRTCSPEILSRVLHYQLQAFPKMEGGEGEAVTDEELVDAIVSLCQSQRNNHELKVQLFSTLLLDLKMWSSCTYGLQKKLLSSLADMIFTEAACMRDANALQMLLDSCRRCYWAIREPNSIDNFALTGTKRSLGEINALIDELLVVVELLLGSASSTAASDDVRCLIGFVVDCPQPNQVARVLHLIYRLIVQPNISRANMFAQSFISCGGVDALLVLLQREAKAGNNSILDNSDALLSENDFLRNDDSDTKAASGEAKSQDDQIQSVELEQHESILHEEHTELGSTSTNDVPCEILGSSIGRKLSSSENQLLKNLGGINFSITADNVRNNVYNVDKGDGIVVGIIHILGALVASGHLKFASRAANPNLPGGLLTTVHEEGNTMSEDRVSLLLFGSAESISSSPKEAYDCKCLYGFNFCCDQCFFS

SEQ ID NO: 53345 - protein, 727 aa, Oryza sativa
MAAAAAAKGRTEMEVGADGVAVITICNPPVNSLSIDVLLSLKENYAEALRRNDVKAIVVTGKGGKFSGGFDISSFGSVQGGKVEQPKVGYISIDIITDTLEAATKPSVAAIDGLALGGGLEVAMACHARISTPTAQLGLPELQLGVIPGFGGTQRLPRLVGLTKALEMMLLSKPIKGAEAHQLGLVDSLVSADDLVNTARRWALDICELKRPWIKSLYKTDKLEPLGEAREILKFARAQARRQAANLEHPLVCIDVIEEGIVSGPRAGLWKEANAFQGLLFADTCKNLVHVFFSQRATSKVPGATDLGLMPRKVTKVAILGGGLMGSGIATAMILSNYPVILKEVNEKFLNAGIDRIKANLQSRVRKGKMTEERYEKAMSLVTGVLDYERFKDVDLVIEAVIENVKLKQQIFSDLEKYCPSHCVLATNTSTIDLNLIGEKTRSKDRIVGAHFFSPAHVMPLLEIVRTQHTSPQVVVDLLDVGKKIKKTPIVVGNCTGFAVNRMFFPYTQSALLFVDLGMDVYKIDRACTKFGMPMGPFRLADLVGFGVAAATGMQYLENFPERVYKSMLIPLMMEDKRTGEASRKGFYKYEDKRKATPDPEIMKYIEKSRSMAGVTPDTELMKLSEKDIVEMVFFPVINEACRVLDEGIAVKASDLDIASIFGMGFPPYRGGIMFWADSIGAKYIHDKLEVWAKRYSDIFKPCSYLAERAANGVPLSAPAKQVKARL

SEQ ID NO: 53346 - protein, 74 aa, Oryza sativa
MAMASGSPELGGVERPRRGGLPQYLPLPNHHCCQLFLPLPDPARSRLHRVGDFQIWSSSSWLRAASTTTATKRM

SEQ ID NO: 53347 - protein, 496 aa, Oryza sativa
MARKMLKDEEVEVAVTDGGSYDYDLFVIGAGSGGVRGSRTSASFGAKVAICELPFHPISSDWQGGHGGTCVIRGCVPKKILVYGSSFRGEFEDAKNFGWEINGDINFNWKRLLENKTQEIVRLNGVYQRILGNSGVTMIEGAGSLVDAHTVEVTKPDGSKQRYTAKHILIATGSRAQRVNIPGKELAITSDEALSLEELPKRAVILGGGYIAVEFASIWKGMGAHVDLFYRKELPLRGFDDEMRTVVASNLEGRGIRLHPGTNLSELSKTADGIKVVTDKGEEIIADVVLFATGRTPNSQRLNLEAAGVEVDNIGAIKVDDYSRTSVPNIWAVGDVTNRINLTPVALMEATCFSKTVFGGQPTKPDYRDVPCAVFSIPPLSVVGLSEQQALGEAKSDVLVYTSSFNPMKNSISKRQEKTVMKLVVDSETDKVLGASMCGPDAPEIIQGMAVALKCGATKATFDSTVGIHPSAAEEFVTMRTLTRRVSPSSKPKTNL

SEQ ID NO: 53348 - protein, 718 aa, Oryza sativa
MKPMPRQLSSSSNRDNSRFCMPPFGQALLLLLLCFVCHAGSCTEQERESLLQFLSGLSNDGGLGVSWQNGTDCCTWEGITCSGNGAVVEVISLASRGLEGSISPSLGDLTGLLRLNLSRNSLSGGLPLELVSSSSIVVLDVSFNYLTGGLSELPSSTPDRPLQVLNISSNLFTGNFPSTTWERMNNLVVLNASNNRFTGQMPTSFCASAPSFAVLELSYNQFSGRIPAGLSNCSKLTLLSASYNNLTGTLPDELFDLTSLKHLCFLRNQLEGSIKGITKLKNLVTIDLGQNRLSGSIPNSIGQLKRLEKLHLAYNSMSGELPSTVGNCRNLKNMNLGGNNFSGDLGNVNFSTLRNLQSLDLMSNNFTGTVPESIYSCRNLSALQLSNNSFHGQLSEKIRNLKCLSFVSLVDISLTNITGSLQILQSCRNLTTLLIGYNFMQETMPEDDEIYGFENLRIFSLNDCSLSGKIPKWLSKLTNLEMLSLYNNQLNGAIPDWISSLNFLFHIDISNNSLSGEIPSALVEMPMLKSDNVPPKVFELPICTGYALQYRINSAFPKVLNLGINNFTGIIPNEIGQLKALQLLNLSSNRLSGEIPESIYKLTNLQVLDLSSNNLTGTIPDGLNKLHFLSAFNISNNDLEGPVPNAGQLSTFPSTSFDGNPKLCGPMLARHCGLAQTPFVSTKQNADKVVSSFVFMISFGAFFAVGVLYDQIVLSRFF

SEQ ID NO: 53349 - protein, 237 aa, Oryza sativa
MEADRKAMANQANVPADPQFQSRTTYRVKNKVIYCLDGARIGIQYETYFAGEPCEIYHCVLESKSFLEKMTVIEHTLPFFLPIREVESEFLSSNAIKFIDHLEEILQSYVDRREQVRLIKELYGNQIGELFHSLSYNLIEFVMEDFECKVTVSIRYSDLLFTLPSQARVLAWPLRSSRGISVTERRASRSASAQLVPFRLPYAEDALKTLSLPEAFAEIVLSLPRALKRILSSQESD

SEQ ID NO: 53350 - protein, 528 aa, Oryza sativa
MGSKTKGCCGWLIVALVASLVATAAVVAIMKKKVGGGSGRKLKPLPVPGPPGAIDSKYGDALGVALQFFQVQKAGKLENNQIPWRGDSALDDGKPAGLDLSKGMYDAGDHIKFSFPMAFTATVLSWSILEYGDQMSATKQLDPALDALRWITDFLVNAHPSDNVFYIQVGDPDLDHNCWERPETMSEKRPLTQINTKSPGSDVAAEAAAAMASASIVFKSRDTTYSDSLLQHAQKLFTFADTYKGLASDTYPKLQNYYNSTGYQDELLWAASWLYHATGDQTYLSYVTVENGKAFADWGRPTWFSWDDKLAGTQVLLSRLNFFGSKQTSNAENMGLKMYRDTAEAVICGLLPDSPSATASRTGGGLVWISGWNSLQHATNAAFLAVVYSDYMLTSQTAAVQCSGKYYSPTDIRNFAISQANYILGDNPMKLSYLVGYGSSYPQQVHHRGASIPADAKTGCKGFQYLHSTSPNPNVAMGALVGGPFQNDTFVDSRDNAVQTESSTYNSGTLVGLLSGLVTTSSVAQSFT

SEQ ID NO: 53351 - protein, 289 aa, Oryza sativa
MAAASGPWLLVVVVAWVLGVAAASSSSSSPGQAGTSQKFNKCMPCSRRYVADSYLDTLIGQLAQHRDLTETSDSADSCKGLDYDLDAPMLTELHSELVGEGSHRRLVYHVEFANCADAMVNFLDNYDANLVVIENLPNGVFADPFELQHFVERKVYLDMVVFGDTNLELPSALSNRSSVEIHVDLAPLASMNCNLVIDLPLHARYPPLDASGYATVEFGSPDLLLRYRKKDTVPESCSWLLKDLDAAPVEKATWRIPCGDEAHIGFVSSITFLSALVCSILIVIAALFY

SEQ ID NO: 53352 - protein, 349 aa, Oryza sativa
MPGYVLSRGTNLSQAHEEKLDMLVQEIRPEIPLYVTTMKHSNVNSYHASLVIAKHYACAYFPHTSQTITLKWHGKNRKWHPKFYIRKDQVGYILHGRWIDFVRHNHVKEGDICIFHLKNFNGRKFRATVHLLRETIPHSFGALHIPKRFESRNGRMRLKMTDDRRVSSTECRRGTMEPSTTNVKKEADNEQCNNGQGKRREPLNFDVSVGSSKPYLTADRVSLTEEQFMKVEENVHSIQSEGPIYVSIMNKSNVGTDGLYIITLGRQFAIRYLPEGEQTLTLLTTGTGKAWQVKMRPRSGDARMFTLGWRDFVRDNRLQTEDICLFQLTKNSERGLAMKVHIIRHNERS

SEQ ID NO: 53353 - protein, 427 aa, Oryza sativa
MEEKKQQQQRPQRGRDGILQYPHLFFAALALALLLTDPFHLGPLAGVDYRPVRHELAPYREVMARWPRDNGSRLRHGRLEFVGEVFGPESIEFDRHGRGPYAGLADGRVVRWMGEDAGWETFAVMSPDWSEKVCANGVESTTKKQHEMERRCGRPLGLRFHGETGELYVADAYYGLMSVGPNGGVATSLAREVGGSPVNFANDLDIHRNGSVFFTDTSTRYNRKDHLNVLLEGEGTGRLLRYDPETKAAHVVLSGLVFPNGVQISDDQQFLLFSETTNCRIMRYWLEGPRAGQVEVFADLPGFPDNVRLSSGGGGGRFWVAIDCCRTAAQEVFAKRPWLRTLYFKLPLTMRTLGKMVSMRMHTLVALLDGEGDVVEVLEDRGGEVMRLVSEVREVGRKLWIGTVAHNHIATIPYPLEEQSSSNVLGD

SEQ ID NO: 53354 - protein, 403 aa, Oryza sativa
MVGMYQQQLVEDPFPLSGGYCSDQPRHAPASASTSTSTSSSAAVAASPLAQAHGAGEPRRLFEAFMGEILLPLRGEGGANGGGVGRGPGGVGDLGELLRWTREVAANPVAARPVPAEVKARKRQVLALRRARYLRMEDVANADELPSFFKKRKYRSHNNHAERQKGEGSMNMPTRKSERLAKRMKLMTSVLLTQRKKIGVGEHFQAEVPDWTEPPSDELARYKNDPNISKMLGTRIWPPEGQVLQTDKKIAGQGRMESCNCSYPGSFFCRQHHTDAARDQLRCELGRAFTEWRFDSMGEEVSKMWTREEQLKFNALERLVPVMDHKTFWAVASKHLASKTRIELVRYYLNVFLMRRVLSQCRLNLLEIDSDEDETEEEEDEDQSESTSTSQRTQHAQNVKSIS

SEQ ID NO: 53355 - protein, 821 aa, Oryza sativa
MALDKGKLDDAVNFGTKALSKIVAVCGPYHRLTANAYSLLAVVLYHTGDFNQATIYQQKALDINERELGLDHPETMKSYGDLSVFYYRLQHIEMALKYVNRALYLLQFSCGLSHPNSAATYINVAMMEEGMGNVHVALRYLHEALKCNKRLLGADHIQTAASYHAIAIALSMMDAYSLSVQHEQTTLQILQEKLGQDDLRTQDAAAWLEYFESKALEQQEAARRGIPKPDSSIASKGHLSVSDLLDYISPDQERKERDTQRKGRRAKNNIRAHQGELVEEKESFEHDIGSPHEANKEEFQQVKSKAHPPAISEENYAIHDELKQVDPLSPEEYSDEGWQAANLRGRSANVRKKSSRRRPALTKLMVDRLEDGRTGSAYRAGVQQHMKGDKEDVINSSSQLSFGSFLKTDKVNGNSSNIENKVFNAISKPERGIKLSGINRPATIASKLVSYKDVAVSPPGTVLKPILEQKEAKEKDNAQNTDLIVSSEEEDKKLTDEDEEKEKPSHDSSKEVLSSEPEEIGNDEKAPDSNSDESPTESKKKGGSKLSASAPPFNPGSLLSMSHPYSTVAIYDASVVLQPIPSQPMEILPHAIDTRVPRGPRSTLYYRTGHTFQRKQGYAHSQSTILRGSNSPPTMNPHAAEFVPGKTSQQPDVANREPSADVSVTDSADQLLAPQTSDEVKAGMPAAEQAIQGESTSPCKGKENRAKDALRNSCKTELARQILFSFIVKSVHDSLGSTGAESDRKPSGPDESGNAQSSNNINKSPSGRKELDKQQKATVVPKSEKDTEGFTVVSKRRRSKQHFVHPIHGLYSQQSICTSVS

SEQ ID NO: 53356 - protein, 958 aa, Oryza sativa
MTGETRKERSKWDTKGPPDIVEISEDESLPMNMDDHKKGNDDHRKGSDLLPSQDFGHGNDKQIGESLNLKSTVSMHHGSAGHEQDRADGLNKDIKERSSKASSERLPLRMGDEDHNKNDWHNRGFEKAAGNQGMSRYADDRRRGDGWGTTLSRGYSSRISSSGPDAWKRSRSPLSPRGGWNRSRRNRSRSRSRSRSIGRGRGRSRSRSRSPYFSDRGSEWRVERSRSSGGPALPCRDFVAGRCRRGSNCRFPHEDGVRRQFDEHYPVDSREKYGHQNRDFMDPREQDDYLRNRPPRGGHYDEGTWERSEPRREYRSTMPCHDFVKGRCSRGANCRYVHDDSTPHGGWRDEVRDNAIGRSGPDSSYGNRTEHRRTNKNPCKFFANGGCRRGQNCPYLHEEASQSQMGLGAPDEPGYTGGPTTRGDYLSWSEQNNSVQASSHVLSRDGRENPVPQGTGRNDSRYENKNRHSKDAGSSQYQIFPQDDFGSVGQNKPEIAASQLPQFIPSVQTGTESINIDKVSDMGGQSGPGTVGNLSMQIGMHSANLLGGHNLGQKAESQDAISQISAAPSLPGATQLQNTTSSVPLNSQVQQSDFSLHPNRQDQFAVPHATTNNSAPSMQSQPVAPYMGHSQHGYIMGAQSLPDLSVHNGQIFNVGQVPQNLPTIVHAGQNQATSDTPNLGRDSGDQGLQNTHNFQPVAPNEQTQSQTLQGLSVVASSSSVDMAGAPLSHNAVSSQEEVRRVTASLAQYFVPSLTADTSGLQSSQPDPNSSLMNNSSAAPQAVQPNHWPWLQQAGMVQPSHIVPPEQPAPQTFQAPMAAGSSNGNPLLLPHSVAPTVPAAALATNETTPAENKKEEPKDTDAEANEDGENKKSKDSKALKMFKLALADFVKDALKPTWKEGQMSREVHKTIVKKVVDKVTTTVENTPQTKEKIDIYMSYSREKLNKLVQAYVGKYAKKD

SEQ ID NO: 53357 - protein, 754 aa, Oryza sativa
MQDAGSALSDTIYFVRIIFMFFIGLEMDLRYLRHHLRRSLAIACGGSGLCLLLAALAGPFFYGLLHPGQGPFKPEKLYASTALFMLVLTTTASPVLIRIVTELKLTGSEAGQLAIGAAFANDMASLSVFSIMVVGTTAYGPDGQPTPSFPDMSIVMSMAFTACLAVLAAARAARLLNRLKRGRRYVSKYELCAMLLLIIALSLLEQVFGYSASMTAFLIGLAMPRDGPTARTLVDRLTYPVHQLVMPLCFGAIGARLDFAAVGSFTAMQFAVAVAFTTLLGAVGKVGGTVLAGRMLGISARESLVLGFLLNVKGYCDILAINFGNQAGIWGQTAQVVLLLSSILNTFMAGPAAAAIVRQQRAASRYRSRCLQDLKVDHELRVLVCVHGAGGVHTMLTLAELSKGTAPLAVYLLHLVELMAARKYAITHLYHDADADDDEWGYAREIEQVAAAVNTFTYDAGVPVRQMTAISSLGSMDADVRNGVEDSRASLVIVPFHKEQRYDGRMVCRREGRRQLNQRILQRLPCTVGVLVERRLGGGGDKGAEDVVKNQVVAVFLGGPDDREAVAYATRLAAHPWVSVTVVRFLPARQDDITIGIDEQLLATTKSHGGEGAMEVAVEDEEAMADEEFMADVYARLVLAGQVEYTERYVSNGAEMVNSLSAMVGTYSLFVVGKGGGGSAAAAMTSGMGGLLEDECPELGPVGEVLASDDFTACGSVLVLQQHSAHVHRRMRRWNPNIHITTTPSSSDHHSHPP

SEQ ID NO: 53358 - protein, 111 aa, Oryza sativa
MHVQLNKDTGFSILNWILWIITHGPLYSNPFFLFFNGIHPMVNENCIFFLSFYLNSYNLDNIFYMIPSYTCGLAICICKPTIYNRNKPVRFDVNVLIFFPFSTHGHPTSIT

SEQ ID NO: 53359 - protein, 250 aa, Oryza sativa
MPNRTITEGRLLFFNVHYGIALLEVKGDFQLQVPSFGLGINYGQDVFALARDENMSLMVRHGTISWLDYPGLLTNPYMFLSCDIPEGGSGGPVVDHDGNIIGIAFDRNPGPVVISITTIRTCIEMWHQFSRVARPMLGMQLKAVELLDVSMREELCLEYNITGGFIVNLVKVDSTAERIGIRRGDVIVFKDNRCSTLPQLEDYLLSLGWGYLQGLSFTVDLKVEVHNLADSYKESITFPVPFSDASKRVD

SEQ ID NO: 53360 - protein, 342 aa, Oryza sativa; identical to SEQ ID NO: 36987

SEQ ID NO: 53361 - protein, 344 aa, Oryza sativa
MAEQAPLAPMPRVKLGTRGLEVSKLGFGCMGLTGAYNSPLDDDAGAAVIAHAFRRGVTFFGTSDVYGPLANEILLGKALKQLPREQVQVATKFGIRRGADGVRAVCGRPEYVRACCEASLGRLGVDYIDLYYQHRVDTTIPIEDTIGELKKLVEEGKVRYIGLSEASPDTIRRAHAVHPITAVQMEWSLWARDIEPEIVPLCRELGIGIVPYSPIARGFFGGRGVTEQLSAESNLQGHPRFSAENLEKNKQLYLKTEELAKKHQCSPAQLALAWVLHQGDDVVPIPGTTKIKNLDANIDSLKVNLTDDDLKEISSQVREEDVAGGRQYTSFAHYTWKYADTPKK

SEQ ID NO: 53362 - protein, 543 aa, Oryza sativa
MGKKAGTTSSWLTAVKRAFRSPSKDDSPNKAARLRDDTDDDKGKRERRRWLFRKSSSPSPAPPTPPPPQQQQQQSRAAAVTEEQRHAIALAVATAATAEAAVATAQAAAEVVRLTRPSSSFVREHYAAIVVQTAFRGYLARRALRALKGLVKLQALVRGHNVRKQANMTLRCMQALVRVQARVRDQRMRLSQDSISLSAAAASAAPCGSSKSSYSVDTSTFWDSKYTHDFAAADRRSIERSRDGSSFAAGDDWDDRPRTIEEIQAMLQTRKDAALKRERALSYAFSHQIWRNPAPSVEEMDVDGQPRWAERWMASRASFDTSRSTVRASAAAAPGRASTDHRDQVKTLEIDTARPFSYSTPRRHGNASYHASSSPMHRAHHHSPVTPSPSKARPPIQVRSASPRVERGGGGGGSYTPSLHSHRHHASSGGAAAVPDYMAATESAKARVRSQSAPRQRPATPERDRMSFGGGGGGGGAKKRLSFPVPIDPYGAYAQSLRSPSFKSAAGRFSSEQRSNVSSSCAESLGGDVVSPSSTTDLRRWLR

SEQ ID NO: 53363 - protein, 261 aa, Oryza sativa
MPPNMITLTGFMFLVVSALLGYIYSPHLDTAPPRWVHLAHGLLLFLYQTFDAVDGKQARRTSSSSPLGELFDHGCDALACAFEALALGSTLMCGRFTFCFWVIAAVPFYLATWEHFFTNTLILPLINGPTEGLMLIYLSHSFTFLTGAEWWAQDFRKSIPLLSWVPLPFIPDIPLYIIVMILMILFAVIPTIGSNVSNVQKVVEARKGSMVLALAMLLPFIALLTGVAVWSYLSPSDIMRNQPHLLVIGTGFAFGYLVVSF

SEQ ID NO: 53364 - protein, 197 aa, Oryza sativa
MAMAAASASAMARRAASWPRLLLLSRAFAAAAAEPKRVLVPVADGTEPVEAAATADVLNRAGARVTVATADPAGDDRGLLVEAAFGVKLVADGRVADLEGEAFDLIALPGGMPGSANLRDCKVLEKMVKKQAEQGGLYAAICATPAVTLAHWGLLKGLKATCYPSFMEKFTAEIIPVNSRVVVDRNAVTSQGPSNSN

SEQ ID NO: 53365 - protein, 471 aa, Oryza sativa; identical to SEQ ID NO: 31705

SEQ ID NO: 53366 - protein, 499 aa, Oryza sativa
MAHVMAASELVTATIKRPFQNDDDNSSNGNGNADGKPKARRREADPAAALAAARHEFGEHGGVNMSIEASATFTVMEPDTMRRLFSGELGPERGDLYIYSRHFNPTVLALGRQMAALEGTEAAYCTASGMSAISSVLMQLVGAGGHVVASRCLYGGTHALLSRFLPRASGVRATFVDADDEAAVRAAVRPGETRVVYVETMSNPTLAVADIPMLARVAHDAGAKLVVDNTFTPMVVSPARLGADVVVHSVSKFISGGADIIAGAICGPASLVNAMMDPAGGGPDAAGPDDERQGGLRALGAPPAPPAPDAGALAARRRVRVPDAPPRPPRRLPGPPRPPAPRPPPRHRQPGLRRRRHALRRHGHRGPRQPPHAPPPEHHPLRPHGRQPRLLRDPHVVLRQQHQQRDAARGPRSRRHLPRPRPHVRRVQRHARAAVGAVRARALAHAAAAAAASRPRRRRQVLQGVTSRAPPLMVRISDDPICCICPVLLVCIYSLLCNY

SEQ ID NO: 53367 - protein, 877 aa, Oryza sativa
MDLEIVGRHALLFDDDPTAEVVNSGGSLVPWAAVGADDLLLDRHDVRHLLDRVPPRPRRSYSAALLSAPSLDGVSEAELDRERFLDLTADDFGGEGSQDAVSSGNGTDTGWADYNSVPFSYGSTAGSDDPNNLSTYYCPSFPVPDRLLNKLPPSEKVHQIIARTALFVSEHGGQSEIVLRVKQGSNPTFGFLMPDHHLHSYFRYLVDHPQLLKDGLDADSNKGCKTANSESGHDASSGGALSLLGAVYESGDEDEGMLPPSPKSTVPGKDVVVHEQGHESSVSAIHCNEETRDGQKATAAATVAAKDKSILTKKNPMITGSSLLAARLEKAKDAMMASSTSDVSDTKVVILEPPSFLKRTMEKIVEFIIRNGKEFEGKLIEQDRTTGRFPFLLPSNPYHPYYLKLLEETQESKSRGGSSEPKDRKSSSEHKDRRSSSEQKDRRSPSERKGSNHGKGESKSKKRSSTSKDASSPDRSSAEPSEKQLYDKHKQGKGKFHMIISGAKKEPPRNVTADEAAAIVMAATRGFGPANIQTNTLKDTSGIGQTRGDNGHTSSFGSFSSLQDPDVPSKPVSNSEACTSLTSSGQPKNEGTGIIDDDWIANTIAKAAAVAASKEADSSEASMTKEQKLKAERLRRAKMFTSIIKSGGSKMADLSTSADQTNEAGRASPGDLNLSESDPQPSAKEREGSSVPFEREGSNLAKQEKDSDDERNRARKYRKKHHPESDEENYGSEESYKHSRKKHRSEDSRAHTSDVHKHKLKRHSKDLEPRHHRHRDSSSEDEHEHRSSKSRHRHRDDYHYHEDDEHRSSHRHQRDHRSSSKRKKDDDRDKSKQTIVLPEVSQNQEKPPGDTAQSSQATTEVPSELRAKIRAMLLETL

SEQ ID NO: 53368 - protein, 269 aa, Oryza sativa
MAAAAAAATIGMMDSAYFVGRGEILSWINATLQLSLAKVEEAASGAVQCQLMDMVHPGVVPMHKVNFDAKTEYDMIQNYKILQDVFNKLRLSKNIEVNKLVKGRPLDNLEFLQWLKRYCDSVNGGIMNENYNPVERRSKGCKERSLKGSNKSSKSLQANRLSSANSADGGPCVGKVNVISEEHYIEQIQQLSEKIAGLKISMDSAEKERDFYFSKLRDIEILCQRPELEHLPMTKAVQKILYAADARDSPLPEANEIITRSPSMFPDEA

SEQ ID NO: 53369 - protein, 521 aa, Oryza sativa
MASPASRCVLLDPGVPDYVFSIGPTEQGWASIDLKKKRYQGCGRYGPLLAESVKLYVRLAEEHPALSRLAICADKNIIRNIVAEELKKKKASKAAESSSPGLMVPDLAIRAIEFDKIDEISGVTARVEVADKNLMVLSLSFVFTSSKHYLLYDAIHASMSMIPIPNWCCDIYLPSNPLPVRYGDEYALVLFAKNYPYKREGRSTCIDLLYLWTPPKSSSPPTLLPPPPPPPREKMYPNPSGEPWHTRKPRFSKETPASFCHHVKFTSSSHAFWADLTKGVLCCRIKDLLDSFFVHFDFIELPPGCKSDALDDTDTGPAEMFRTMGCSTGDLIKFVSISFDDSVPEDDKTVTEWTLDMGTLQWTKGEELRFGTLWELDDFKKDGLPETEPVYPLLSMEEGDGGDLYFILSRPIMRWEDPAVHHVCRFNMTSKKLVSNPLSWRPDKIVPSGLLGCEFFRHLDSQRLVPDNRKMDAGKVQSWVEMESALEEVDESMQREISRKQMVWSGSQLDCFARQIREIKC

SEQ ID NO: 53370 - protein, 70 aa, Oryza sativa
MLSKSIHRSILRCGLSIGWINPLAEQNLGSIWVLLSFIFPNFYCFYIDHRIKSNFLKVIMVLNLDFRKTN

SEQ ID NO: 53371 - protein, 492 aa, Oryza sativa
MNSYSGDRSSSSSSSRPTTTSFDSYQFDFGVNSSRSSASRPLRPGPGATAGGAAAGGVGVGGSAWTHQPAKTTSWTHQPSPASAAAGAGSGPTSMVGDIFGRSWSSAAPSSGLGIPQANNPGLFSDLLGSALGSSSRGQPNAPLRSSAPQTYKPANANPNPSGSPFSMGGMASTLPKTTTGSPMSSGGGGYGVGGRPMKPAGMASAAAAQPMMGQKKDPFGSIDPFAAKPGSMNAAKKANPVKPDQGFGAFQGVNSGGIAGLSGFQTADSGFGSFQSSGAVKPSSFTPLAPAPAPAPAAAAANSGVDHLDSLFASTTAAPTAVSNGGGGGDMFGEMDGWVDVEADFGSGDSGGATTELEGLPPPPSGLTASAAKSKGMDNYKGGQYADAIKWLSWAVVLIEKSGKYADIVEVLSSRASSYKEVGEYKKAIADCSKVLEKDKDNVSVLVQRALLYESSEKYRLGAEDLRLVLKIDPGNRLARSMIHRLNKMAD

SEQ ID NO: 53372 - protein, 628 aa, Oryza sativa
MASASGSATLLYPKTPQSPRLLRRNPHYSGLRLVHPLLLATVSPPPPAALRRRRNSTTIHASSSSAAAAAAAASFPASSTPPPRPPRTDPPEEHPTVARAGRSKKHRKPSGGRIEGGGDVRREAKSRARIRSRRLGENAFYRRKRRAAKENQADAFTDAELEMIGLGYDRSVRFMDGPDDPRLRHRHDWYRFGRYGPYSWRGIVVGPPIRGRFSDDRVSLMSEVSDHDEWDRVEQFDMSNQFSNRLNELDAAVGFRYYWVFVRHPRWRPDELPWEQWTLSAEVAIQASEEQRLDKWNLMGRLGNPTRELITRCAAWTRPDIIYVKRPLYQSRFEPQKNFYSQLRPLVDPVTENQFLFDLEHDGQVIRTTYFGGLCRIVKASPKAYVDDVVNAYSKLSDVDKNRCLEFLLTNHPMELLHPYTKEWKVKLEEMELGCDAPDDNESDDEGGDESGTEVVDWVEDDGFDEGGDTDDDEEPGYDDDEVIDVREEVETEEVESDDESEKYWDEQWKQAMKSSDKMEKLVKTSIEASNEYNRRRMQQEKEMELRMARANTMVMKQEQTEDEDEQQEQIEDEDEQQESPRGRSAKDKRKSKAPGHFLRAAVRPFTYRNLVKEIVLMRHFIVDGEID

SEQ ID NO: 53373 - protein, 330 aa, Oryza sativa
MSDGARVEAAPRLAQWRVDVLPCYTYRKSEPFRIGLWNWYLSVERNNKQTCVKVFAELSNSAKNTTPAPIASFITKLLISFPPNQKTIVHPGIFDKPLKHEGFVWAIDSTVTGRFVIEIEFLDLKIADPSGGEPASIWASHQIKKSSDNTALSSLARMLQEGILTDITINATDGSIMAHRAILASRSPVFRSMFSHDLKEKELSTVDISDMSLEACQAFLNYIYGDLRSEEFLTHRLALLRAADKYDISDLKEACHESLLEDIDTKNVLERLQMAHLYRLQKLKDGCLRFLVDFRKVYEMHDDFKVFLQTADRDIIAEIFQGILTTWSGR

SEQ ID NO: 53374 - protein, 261 aa, Oryza sativa
MLKHQGKLFTCSMDGCGRKFSIKANMQRHVKEIHEDETATKSNRQFVCKEEGCNKVFKYASKMKKHEESHVKLDYVEVVCCEPGCMKTFTNVECLRAHNQACHQYVQCDICGEKHLKKNIKRHLRAHEEVPSTERIKCSFEGCECSFSNKSNLTKHIKASHDQVKPFACRFTGCEKVFPYKHVRDNHEKSSAHVYTQANFTEMDEQLLSCPRGGRKRKAVTVETLTRKRVTMHGDASSLDNGTEYLRWLLSGGDDDSSQTH

SEQ ID NO: 53375 - protein, 314 aa, Oryza sativa
MGGCSSAFAVSTRMIRFSRGRVPAAILPVTSNDEPCCSCSPENNNKNNDGGGGGCDGGEHQKGKSWRRWQYRRCGGGGGGGGGRKNAILGDAADVKTAAGFAERYRLGAELGRGEFGVTRTMLRRGHRGGPGLQDDPPEAAAPVPRRRRGRAAGGGDPPPHLRPRRRRRLRGATPRRLRGLRRRPPRHGALRGRRALRPHLRPRPLHRARRRQARPHHRRRRPAVPRERGDAQRPEAGELPVRQQVGGLTSQGHRFRPLGVLQARRKIHPGGWEHILHGTRGSQQKLWPRSRCLERRRHPLHPALRSSSFLGRQ

SEQ ID NO: 53376 - protein, 989 aa, Oryza sativa
MMESGVPPCAACGDDAHAACRACSYALCKACLDEDAAEGRTTCARCGGEYGAPDPAHGQGAVVEEEVEESHEPAAGGVRERVTMASQLSDHQDEGVHARTMSTHARTISSVSGVGSELNDESGKPIWKNRVESWKEKKKEKKASAKKAAAKAQAPPVEEQIMDEKDLTDAYEPLSRIIPISKNKLTPYRAVIIMRLVVLGLFFHYRITNPVYSAFGLWMTSVICEIWFGFSWILDQFPKWCPINRETYVDRLIARYGDGEDSGLAPVDFFVSTVDPLKEPPLITANTVLSILAVDYPVEKISCYVSDDGSAMLTFESLAETAEFARRWVPFCKKYSIEPRAPEFYFSQKIDYLKDKIHPSFVKERRAMKRDYEEYKVRINALVAKAQKTPEEGWIMQDGTPWPGNNPRDHPGMIQVFLGETGARDFDGNELPRLVYVSREKRPGYQHHKKAGAMNALVRVSAVLTNAPYILNLDCDHYVNNSKAVREAMCFMMDPSVGRDVCYVQFPQRFDGIDRSDRYANRNVVFFDVNMKGLDGLQGPVYVGTGCCFYRQALYGYGPPSLPALPKSSVCSWCCCCCPKKKAEKSEKEMHRDSRREDLESAIFNLREIDNYDEYERSMLISQMSFEKSFGLSSVFIESTLMENGGVPESANPSTLIKEAIHVISCGYEEKTEWGKEIGWIYGSVTEDILTGFKMHCRGWRSIYCMPIRPAFKGSAPINLSDRLHQVLRWALGSVEIFLSRHCPLWYGYGGGRLKWLQRLSYINTIVYPFTSLPLIAYCCLPAICLLTGKFIIPTLSNAATIWFLGLFISIIVTSVLELRWSGIGIEDWWRNEQFWVIGGVSAHLFAVFQGILKMIAGLDTNFTVTAKATDDTEFGELYVFKWTTVLIPPTSILVLNLVGVVAGFSDALNSGYESWGPLFGKVFFAMWVIMHLYPFLKGLMGRQNRTPTIVVLWSVLLASVFSLLWVKIDPFIGSSETTTTNSCANFDC

SEQ ID NO: 53377 - protein, 119 aa, Oryza sativa
MVAYRMGDDVDGIFRSVAEYIIGDGADNRYWTTNWTGNGCFAWRWPILYSYVGHSRLSVAQAMVNHRWVRDLQGSLFNEALGDFFQLWDEVHDVALQPNADAIRLKLTGDRAILGCLGI

SEQ ID NO: 53378 - protein, 88 aa, Oryza sativa
MCSFRCFFYISSETWTFATNGSGADELFDEMPRRFLRALHAQRRFDSIFPLVWCLLSGDLMYHFLLTLFYPILMQRCIKRTLHIPVFS

SEQ ID NO: 53379 - protein, 723 aa, Oryza sativa
MALITPASGGGGGGGDKAPPSASDPSLGFLTKRDTEVKLPRATRVKNKTPASVQITAEQILREARERQEPEIRPPKQKITDSIELSEYRLRRRKEFEDVIRRVRWNVNAWVKYAKWEEQQRDFARARSVYERALDVAHRDHTLWLKYAEFEMRNRFVNHARNVWDRAVSLLPRVDQLWYKYIHMEELLGAVANARQVFERWMAWRPDTAGWNSYIKFELRYGEVERARAIYERFVAEHPRPDTFIRYAKFEMKRGEVERARQVYQRAADLLADDEDAQVLFVAFAEFEERCREVERARAIYKYALDRVPKGQAEELYRKFLAFEKQFGDREGIEDAIVGKRRFQYEDEVRKNPLNYDSWFDYIRLEESVGNNDRIREVYERAIANIPPADEKRYWQRYIYLWINYALYEELDAKDVERTREVYSECLKLVPHKKFTFAKMWLMAAQFEIRQRNLKAARQILGNAIGMSPKGKIFKKYIEIELYLGNFDRCRTLYEKYIEWSPANCYAWRKYAELEKNLSETDRARSIYELAIAQPALDTPEVLWKEYLQFEIDENEFDRTRELYERLLDRTKHLKVWISYTEFEASAGLAGEDGESEEIKKEVSYHEQQIERVRRCRAIFERAFEYFRTSAPELKEERAMLLEEWLNKEVSFGDLGDVTLVQKKAPRKVKRKRPIPTEDGSTVAYEEYIDYIFPDEVALAPNLKILEAAYKWKKQKTDDTDDV

SEQ ID NO: 53380 - protein, 469 aa, Oryza sativa
MGGCFSLEEHRLQGKTEAGGPDGLRKCKSDSKATASVLAPPKDVEDLQIEGYGNVNIFTYNELRAATKNFRPDQILGEGGFGVVYKGVIDENVRAGFPSTQVAVKELNPEGFQGDKEWLAEVNYLGQLSHPNLVELIGYCCEGSHRLLVYEYMACGSLEKHLFRRVCLNMPWSTRMKIALGAARGLEYLHGAERSIIYRDFKTSNILLDADYNAKLSDFGLARTGPSGDQTHVSTRVMGTYGYAAPEYVMTGHLTARSGVYGFGVVLLEMIIGRRAVDKSRPSREHNLVEWARPLLVHNRKLFRIIDPRMEGQYSTKAAIEVAGLAYRCLSQNPKGRPTMSQVVETFEAVQNMPECQDILLQNCMTGAVTLYEVAKDPTESVEPEKIKQEQPAAKTVTVAPAPVNGKPVPQSRRTRPGNGRSKSEPSLECKLYIPSPDSDGQQPGLEALSSPSRDGSIKDPPDEDLYKI

SEQ ID NO: 53381 - protein, 287 aa, Oryza sativa
MTKMHPGESLNIGYLSPYLKALGSDYSNGANFAIAGSATLPRDTLFSLHIQVKQFLFFRDRSLELISQGLPGPVDAEGFRNALYMIDIGQNDVNALLSYLSYDQVVARFPPILDEIKDAIQTLYDNGSRNFWVHGTGALGCLPQKLSIPRKNDSDLDSNGCLKTYNRAAVTFNAALGSLCDQLSTQMKDATIVYTDLFPLKYDLIANRTKYGFDKPLMTCCGYGGPPYNYNITIGCQDKNASCDDGSKFVSWDGVHLTEAANAIVAKGILSSDYSRPKIKFDQFCKV

SEQ ID NO: 53382 - protein, 570 aa, Oryza sativa
MAGVGTQPTSLRKYLGALKDTTTVSLAKVNSDYKELDIAIVKATNHVERPSKEKYIREIFYSISASRPRADVAYCIHALARRLSKTRNWAVALKTLIVIHRALREVDPTFREELINYGRSRSHMLNLAYFKDDSSAGAWDFSAWIRTYALYLEERLECFRVLKYDVETDPPKTRDLETGDLLDHLPALQQLLFRLLACQPQGASSYNVIIQHALSMVALESVKIYTAISDGTINLVDKFFEMQRSDAVRALDIYKRATNQAERLSEFYEVCKTIHIGRGEKFLKIEQPPASFLVTMEEYVTEAPTVAQKDKVLAIEYKKEAEEEEKPASPPPAPEPEPEQEPEPEPEPVKEEAPKEEPTDLLGLNEPNPAAAEIEEKNALALAIVPIDDVPKVAPAQNGVTGWELALVTTPSSNETAITSSKKLAGGLDLLTLDSLYDDANRRASQPTSYNPWDVNPGVAGAGAAPMMQQPMMHDPFYASSGYAAPHNVQMTAMAQQQQAFMLQQQMMMAAAAAAAAAPPPQVFHHHQQQQQHLQANPANPFGNPFAAAAAAHHPYGAAAAAGNGYTGLI

SEQ ID NO: 53383 - protein, 1008 aa, Oryza sativa
MAWLRAASGLARHALRRRVPVASRFFHSARPAWRSSAPVPRAVPLSRLTDSFLDGTSSVYLEELQRAWEADPSSVDESWDNFFRNFLGQAAPSSAGLSGQTIQESMQLLLLVRAYQVNGHMKAKLDPLRLDDRAVPDDLDLSLYGFTEADLDREFFLGVWRMAGFLSDNRPVLTLREILSKLEQAYCGPIGYEYMHIPDRDKCNWLRDKIETAKLKEYNKDRRLVMLDRLIWSTQFENFLATKWATAKRFGLEGGETLIPGMKEMFDRAADLGVENIVIGMPHRGRLNVLGNVVRKPLSQIFSEFTGGTRPVEGEDGLYTGTGDVKYHLGTSYDRPTRGGKRIHLSLVANPSHLEAVDPVVIGKTRAKQFYSNDLDRTKNMGILIHGDGSFAGQGVVYETLHLSALPSYTTGGTIHIVVNNQVAFTTDPRAGRSSQYCTDVAKALNAPIFHVNGDDLEAVVRVCELAAEWRQTFHSDVVVDLICYRRFGHNEIDEPSFTQPKMYQVIKNHPSSLKLYEQKLLGTGEVSKEDVQKIHEKVNRILNEEFAKSKDYVPNKRDWLSAYWTGFKSPEQISRVRNTGVNPGVLKRVGQAITTLPEDFKPHRAVKKIFEQRAAMIESGEGIDWAVAEALAFATLIVEGNHVRLSGQDVERGTFSHRHAVLHDQENGRKHCPLDHVVMNQNEELFTVSNSSLSEFAVLGFEMGYSMENPNSLVLWEAQFGDFSNGAQVMFDQFLSSGEAKWLRQTGLVVLLPHGYDGQGPEHSSARLERFLQMSDDNPFVIPEMEPTLRKQIQECNWQVVNVTTPANYFHVLRRQIHREFRKPLIVMAPKNLLRHKDCKSNLSEFDDVEGHPGFDKQGTRFKRLIKDRNDHKQVEEGIKRLVLCSGKVYYELDEERKKTERSDVAICRVEQLCPFPYDLIQRELKRYPNAEIVWCQEEPMNMGAYSYISPRLYASMKTLGRGSFDDIKYVGRAPSAATATGFLSVHAQEQTELVKKALQAEPIKFP

SEQ ID NO: 53384 - protein, 907 aa, Oryza sativa
MWNPLSWVMEAAAIMAIALANGGGRPPDWQDFVGIVTLLFINSTISFIEENNAGNAAAALMASLAPQTKLLRDGKWSEQDAAILVPGDIISIKLGDIIPADARLMEGDPLKIDQSALTGESLPVNKMPGDSIYSGSTCKQGEIEAVVIATGVHTFFGKAAHLVDSTNNVGHFQKVLTAIGNFCICSIAAGMLIEIIVMYPIQHRQYRDGIDNLLVLLIGGIPIAMPTVLSVTMAIGSHRLSQQGAITKRMTAIEEMAGMDVLCSDKTGTLTLNKLTVDKDMIEPFVKDLDKDAIVLYAARASRTENQDAIDASIVGMLADPSEARAGIQEVHFMPFNPVDKRTAITYIDTKDGSWHRISKGAPEQIIELCRLRDDVSRRVHAIIDKFADRGLRSLAVARQKVPEGSKDAPGTPWQFLAVLPLFDPPRHDSSETIRRALNLGVNVKMITGDQLAIGKETGRRLGMGTNMYPSSSLLKDGDTGGLPVDELIEKADGFAGVFPEHKYEIVRRLQERKHICGMTGDGVNDAPALKKADIGIAVADATDAARGASDIVLTEPGLSVIISAVLTSRAIFQRMKNYTIYTVSITIRVVLGFLLLALIWRFDFAPFMVLIIAILNDGTIMTISKDRVKPSPLPDAWRLQEIFATGIVLGTYLALATVLFFWAVRDTDFFTVTTHHPTSHASPPRALTPCVCGQRTFGVHPIGGSTEELMAAVYLQVSIISQALIFVTRARSWFFVERPGLLLVGAFLIAQLMATLIAVYANWPFAKMKGIGWSWGMVIWLFSIVTFFPLDIFKFAIRYFLSGKAWNNAFDNKTAFANELDYGKSKREAQWAIAQRSLHGLQQAETSTALFDDNKDYLELSEIAEQAKRRAEIARLRELHTLKGHVESVVKLKGLDIDTIQNHYTV

SEQ ID NO: 53385 - protein, 438 aa, Oryza sativa
MEKERKMEGERRVEATRRWVIAVGFWVQGFRLFPWLGVNFFLKDGMGVAASSLQILQASANLPMVAKPLLGLLSDAVPIRGHRRLPYVAIGALLQAISWLAIALWPAISLPVLTIFLLLSNFGASICEVANDAIVAEAGKQATLSSGSGQLQSFAWMFGSSAGALGNLVGGIALSYFSPKIMFLFFAILLVLQFCTTVAIPESSLQLPKADTNLSAVSSVRKQIKELSYALCMPEIFWSVIWFSLSYAAIPFLLGTMFFYQTEVLRLDSSVIGLSKVFGQVTLLAWSVAYNKYFKTTPAQKVLSVLQFLTALVMLSDVLFVQGIYRNFGIPDSMYTIVFSGLLEGLMLFKVLPFSVLVAKLCPSGCEGSLMAFVMSALALATIISGYLGVALAEFMGVSGGDFSALPTCLLIEAACTMLPLFFSSLIKERREKEKKEE

SEQ ID NO: 53386 - protein, 823 aa, Oryza sativa
MEVPISGGGGGERFCHAAQVVGADGEMDGEAMARFAAGAGLLGRGLSYAVVSIVGPQGSGKSTLLNQLFGTSFTEMDALKGRSQTTKGIWIAKAVGIEPFTVVMDLEGTDGRERGEDDTAFEKQSALFALAVSDIVMINLWCHDIGREHAANRPLLKTIFEVLMRLFSPRKTTLLLVIRDKTKTPLEYLTQALKEDIQKIWNAVRKPEVYKEAALSEFFNVEVTALSSYEEKENLFKEQVGQLRQRFIHSIAPGGLAADRRGVIPASGFCLSALQIWKVIRENKDLNLPAHKIMVATVRCEEIADEKLRSFISDKGWLELETAANSGLVPGFGKKLNAILDFYLSEYDTEAMYFDEDVRTAKRQQLESEILKHTYDAFKKMLEHLHHVVLNKFKSDLEQSLRSGEGFAASARYCVQSSMAEFDAGLRDALVKHAEWDTTKVRSKLEQHIEAHATSVRGTKLAELKANYEKKLLDTLAGPVQSILETGEKDSWACIRRLYRHATESAILAFSASLSEFELDQTTIRKMVMELREHARSIVEEKAREEAGNVLMRMKERFSTVLSRDKDSMPRTWKGNEDIRAITREARLAALRLMSVMAAVRLDDKPDKIDRALTTALLDGGPLSQKRSIEFTSDPLASSTWEEVSEKNTLITPVQCKSIWRQFNAETEYAVAQAISMQEAHRRSNNWLPPAWTVLLLAILGYNEFIFLLRNPLYLLGLFVAFVVSYAAWLQYDITAYFRHGTLSGLLTITSGFLPTIMDIITAVINMSHNQKSSSHPPRHRPPLHPQSFRNQAQQQSQAQVQYQAPSSLSSSSSVGSNSDDES

SEQ ID NO: 53387 - protein, 478 aa, Oryza sativa
MDALPKDNVDQGENLPRTDDDSVVHPEGEVESEGVPRPARLSRVVPPGLDEFKTRAIAERGKGVPSGQPGNVIHRREPSGKLYNYASAAKGAKVLEFNKEAKGASNILDKDKDKYLRNPCSAEGKFVIIELSEETLVDTIAIANFEHYSSNLKEFEMLSSLNYPTDSWETLGRFTVANAKIAQNFTFPEPKWARYLKLNLLSHYGSEFYCTLSMLEVYGMDAVEKMLENLIPVENKRLEPDDKMKEPVDQQTQLKEPTEGKESSHEPLDEDEFELEDDKLNGDSSKNGAHDQVTETRPIQAGRIPGDTVLKVLMQKVQSLDVSFSVLERYLEELNSRYGQIFKDFDADIDTKDALLEKIKLELKHLERSKDDFAKEIEGILSWKLVASSQLNQLLLDNVIIRSELERFREKQADLENRSFAVIFLSFVFGCLAIAKLSIGMIFNTCRLYNFEKFDRVKSGWLVLLFSSCIIASILIIQ

SEQ ID NO: 53388 - protein, 223 aa, Oryza sativa
MIIHSSANRVSFASAIEGRWRLASTITQGSGDRYADCVYHKGRFYTLTMYGVLEMLDLDNPCEPRKEIFFTERNTENPLVFLRFLVSTPWGDLLQIKFSRRVHRTKRLELRLCKIEVENNRLVRLRSAVAAAALREHAIFVGQNHSVCLPIRDFPELRSSCVYFTTPCLCNDDHFPSRREGWKGVGIYDLQNQIFEDVFPSCERGYSTYLPISEVWITPSPGL

SEQ ID NO: 53389 - protein, 72 aa, Oryza sativa
MFEVPVELLVAGSRTTSPKTRESELVSHFLGGTEPALSVQLGDLGHLAYSHPMPTKPSTAERPKILESCFHS

SEQ ID NO: 53390 - protein, 804 aa, Oryza sativa
MDNILVVCKSTLADDESASEVSSGSDSDSDCILGDDCPSDDDEEAAQIHKRFKELKEKLKTGKVDKLDDVVFEAGAEQDGNDTPSFDSDDEESVEEVASDEEVSARKLIKYPRFKEKPGVPTFELGMTFSCKKQFKKAITAYGLAERKAINFVKDDPKRVRARCDWPSCPWVCLLSKNSRTDGWQIATLENSHLCPSRRDNKLVTSSRIAEKYGKFIVANPSWKLAHMKATVQEEMFADVNISKLKRAKSITMKKAINAAKWQYQKLYNYQLELLRSNPGSTVVVDREVDMDPPVFKRIYICLDACKKGFLAGCRKVIGLDGCFFKGAKNGELLCAIGKDANNQMYPIAWAVVHKANKEEWHWFCGLLCSDLQVGDGSGWVFISNQQKEIINAMDKWAPQAEHRICARHIYANLKRHFYDNEHQKFWKCAKAPCITLFDLAMAELVQLTTPAVQTILNNHPQHWSRAWFRSGSNCDLVDNSMCESFNKWILEARFFPIITMLETIRRKVMVRIHDQRTISGRWTTSVCPNILKKMNVYITESAFCHATCNGGDSFEVKHRDNRFTVHLDKKECSCRYWQLSGLPCPHAISCIFFKTKTNSLDEYIAECYSVKEFKKIYSQCLEPVEGMSSWPEDDKEPLNAPGYIKMPGETRRESNEPLKATKLSRIGSIIRCSKCKQIGHNKSTCNKHHGGGSSTPDSLQVVNPADNLMLSNTQQSSKQSRKRKSRTAANTNSASQSRKTVSSKQKALVELHAHSQGSTSATIKVTSGQAFVNVSTQESAKFKPKKLTPGLLLLMPPWESDKL

SEQ ID NO: 53391 - protein, 847 aa, Oryza sativa
MNLSDDWRFLFPVSSVFAPPSLATSSAAAASYGPLLFSPLPPHATLLALPSPFQPPHPSRRGLRHLLRHFVRSTSFLPFADLDPLSGALLTAPSPPFPAPSNLLAVLRAPSSSRSLVVFFPSGENAEQVSYVTLDPVADPTTPLSHSVQSDGFMHPRHRIQQLATTASWSSWPSRSRDSSIEGFLLAATLYSVNWFKVESRGSGSPALVPAAKQAFDAAVVHACWSKHLQSECVVLLENGQLCWFDLDTRRGGKMKVGFGSKDDLGDWLSCEYGAQPWTVIVASTAAILLVDMRFGDHGEYKVLARVGMEGLFETDPFVKTQCYLAFCKAPFDDFLISVVTERHLMVFDIRRPLIPVLAWQHGLDNPNHIAMFRLSELRPSKEHEWASNSGFAILVGSLWSTEFNLFFCGPKEQDATENAPLYAWDLPSRISLIGRHCSCSIGLMEEVFKGVVPGHGSASQLIRNYIIGYHVLPNTMLESSFTGFALIRLTSSGKLEMQRFRASGDLHDDAICDESQHKSVGSSSSISLDTHGENFSERYEFLKLHYLSKFLKGNLRSSLENHDSDVNKRSRHIIISEDVSVFAKDNSASCSQSVSDFLCNASAPMNIFEIACQSILSRLSSDILLVAFSKYKDMLASTNKKRIYEYLEVPACFPNSNKLRPYLLAKSSSISWNLTSKAKSGNSLVGPVLPIPVLLAMEDSNKGIDSPSREDSSSVSHRCREVIEAFVPEISIANTDNCNGWSASQEVKDDKPYFVYEPQTDRPTLDEAARKKDKQTQKLDDPSCLHAPTAPPMDENFMTFVCGRAGIPHSGPEQAASNLFDFSPVRMKFESPAIDIQPAEEKVYNA

SEQ ID NO: 53392 - protein, 108 aa, Oryza sativa
MTGSSCPADSSQLLYPRREGGGGRGGPVREEGGAAGGVRSAGGGQRLRAPPLRRRRPAPRRRRRPRHAHLLHPGDGGSGRAEPERSKPQGVPALVSHRSSQHTSSCCS

SEQ ID NO: 53393 - protein, 167 aa, Oryza sativa
MASEEETSRLFRIRRTVMQMLRDRGYLVTELDIDLPRGDFVARFGDPVDRDHLVFSRHKKDNGADQIYVFFPKDAKPGVKTIRSYVERMKQESVFNGILVVQQALSAFARSAVQEVSQKFHLEVFQEAELLVNIKDHTLVPEHELLTPEQKKTLLERYTVKETQVWK

SEQ ID NO: 53394 - protein, 373 aa, Oryza sativa
MDDDDYSWVRRTKFSHSIVKSNSGREQFGAFLDPFDSSTAWRQKGFSGELMIHGHNLQPRAKGAVSKSPRPSIPLAKSPVSQAERKLKAKFSDGELKQRGKISDGSLREASKEKDRKVGHKGEGLSLDISCPILDRTVQDDSSDTLDFSFHSEEQSLRLLRVCSSPAPFYSKDTTTFGDSKIHSTSVKIVGEGSKPRRRAESPMPTRVISEVFKEAKAATKRFSSPQRQRKSSSPHSPRSPDDSPRFGFPSMRTPGNLKARRASSWPRNYDNGVAKAVALDILERWTIDRSQLLIGQRFASGAYSRLFHGIYKEQPVAVKFIRQPDEEEDAELAAKLEKQFTAEVTILARLHHRNVIKSQRTYTRNMSIVMRL

SEQ ID NO: 53395 - protein, 280 aa, Oryza sativa
MYNNYGNSPGMQMPPIGQMPPAAGQMPSANPQPGQFGNPFYGASSGLIKTGLGAYGEKLLGSSSEFMQSNINRYFSNPQYYFHVNDQYVRNKLKVILFPFLHRGHWTRISEPVGGRLSYKPPIYDINAPDLYIPFMAFGSFIILAGFTLGFMGKFTPEAINLQFSRGLIGWALQIVILKGLLYSMGGGEVPLLDLVAYGGYLFAGLSLAVISRLLWAYSYFVMMPWMSLCMGVFLVRTMKRVLFTEMRSSERHSTRQHYFLLFLAISQFPLFFWLGNIGA

SEQ ID NO: 53396 - protein, 682 aa, Oryza sativa
MSAYSDKGEGDLEIGLASPEAEGGGPGGPALDLSPPRAVRRPGLVMSHSGKRLDQSPAASPSPSRPVLVMSHSSNRLDQSPARPVLVMSRSSNRLDQSPASSPASSRGPVLVMSGSGNRLDSSGPSPSPSPTAAAAAAPVLVLSNSGKRMDQAGRKKYVKQVTGRHNDTELHLAAQRGDLEAVRQIIAEINAQMTGTGEEFDSEVAEIRAAVVNEPNEVEETALLIAAEKGFLDIVVELLKHSDKESLTRKNKSGFDVLHVAAKEGHRDIVKVLLDHDPSLGKTFGQSNVTPLITAAIRGHIEVVNLLLERVSGLVELSKGNGKNALHFAGRQGHVEIVKALLDADPQLARRTDKKGQTALHMAVKGTSAAVVRALVNADPAIVMLPDRNGNLALHVATRKKRSEIVNELLLLPDMNVNALTRDRKTAFDIAEGLPLSEESAEIKDCLSRAGAVRANDLNQPRDELRKTVTEIKKDVHTQLEQARKTNKNVSGIAKELRKLHREGINNATNSVTVVAVLFATVAFAAIFTVPGGNDNNGVAIAVHAVSFKIFFIFNAIALFTSLAVVVVQITLVRGETKAERRVVEIINKLMWLASVCTTVAFISSAYIVVGKHFQWAALLVTLIGGVIMAGVLGTMTYYVVRSKRTRSIRKKVKSTRRSGSNSWQQNSEFSDSEIDRIYAI

SEQ ID NO: 53397 - protein, 231 aa, Oryza sativa; identical to SEQ ID NO: 30423

SEQ ID NO: 53398 - protein, 772 aa, Oryza sativa
MSDQERGDIPMLLRNVELRTFPPRSTSMCIPVRDDEYEEDTFVPHTGPLFVQPPTQTAAAGIPFTNTPDMPPRPPQGKQVNKPHAIMPEEIGGNRWSYSGNVPKNEHLMMSGPLGQCDDPDCVNCPPACKNKRHFHRGSSTLDSKFHNFLCEHGGGWKKEIERFLSRIPVMNPHAKVVQQWNQFFVISCLVAIFIDPLFFFLLSVQKDNKCIVLNWHFATALAVVRSVTDAIYFLHMLLQFRLAYVAPESRVVGAGDLVDEPKKIAVRYLRGYFLLDFFVVLPLPQVMILLVIPKYVGLSTANYAKNLLRITVLLQYVPRIIRFVPLLGGQSDSSANGFIFESAWANFVINLLMFVLAGHVVGSCWYLFGLQRVNQCLRNACSASKIPSCDGFIDCGRGINIGKQNQLSRQQWFNDSASTACFDTGDNGFHYGIYEQAVLLTTEDNAVKRYIYSLFWGFQQISTLAGNLVPSYFAWEVLFTMAIIGLGLLLFALLIGNMQNFLQALGRRRLEMQLRRRDVEQWMSHRRLPEDLRRRVRRAERFTWAATQGVNEEELLSNLPEDIQRDIRRHFFRFLNKVRLFTLMDWPILDAICDKLRQNLYISGSDILYQGGPVEKMVFIVRGKLESISADGSKAPLHEGDVCGEELLTWYLEHSSANRDGGRMRFHGMRLVAIRTVRCLTNVEAFVLRASDLEEVTSQFSRFLRNPRVQGAIRYESPYWRTIAATRIQVAWRYRNRRLKRAGMSKLNDQSYNSALERGARECDARQHGRV

SEQ ID NO: 53399 - protein, 454 aa, Oryza sativa
MVKGGREALLGGYEMGRTLGEGNFGKVKYARHLATGGHFAVKVLDRGRVVSLRAGDQIRREIATLKLLRHPHVVRLHEVAASKTKIYMVLEFVNGGELFERIAVKGKLSEKEGRRLFQQLIDGVSYCHDRGVYHRDLKPENVLVDQKGNIKISDFGLSALPQHLGNDGLLHTTCGSPNYIAPEVLQNKGYDGSLSDIWSCGVILYVMLIGYLPFDDRNIVVLYQKIFKGDTQIPKWLSHSAQNLLRRILEPNPMKRIDMAGIKSHEWFQKDYIPVLPYDDDDEDVQFGARLPAKEQINDEPGDKNSHQINAFQLIGMASSLDLSGFFEDEEVSQRRIRFTSTHPPKDAFDKIESSATELGFQVQRGHSKLKLMRNCKGSKNPESFMVSAEVFELGPSVNVVELRKSNGDPALYRQLCERISSDMGARNTEQIFATASLEDDLQNSNAGTPLFAL

SEQ ID NO: 53400 - protein, 527 aa, Oryza sativa
MASAKVSHPVKSASEESKVLVVENGKMVDVQDKEITMEGLCSISSYDQWARIPVSGPLPKPRYKHAAAVVQEKMYVFGGNHNGRYLGDMQVLDFKCLSWSKLEAKIQSEEPSDLTGTASLPPCAGHALVPWGNKILCLAGHTREPTESLSVKEFDPQTCTWSTLRTYGRSPSSCGGQSVTLVGGTLVVFGGEGDGRSLLNDLHVLDLETMTWDEFETTGTPPSPRSEHAAACYADRYLLIFGGGSHSTCFSDLHLLDMQTMEWSRPEHQGITPEPRAGHAGVTVGENWFITGGGNNKKGVPETLVLNMSTFVWSVVTGLEGRAPPTSEGSSLVLHKVNGEDFLVSFGGYSGRYSNEIYALKSSRKSGVPSGQLNEPETNGLASVAENSSRGVIFEIEELQDEKTIKRADTSKTLLQAVKGEKSHIEEKLNQEELQSSRLKQELANVETKNVELTKELDLVRNQLSAEEARASQLENEISDLQQRLQKMETLEKESESLRLEKDAESDDSSSGSNQRPADKGFWRWNG

SEQ ID NO: 53401 - protein, 259 aa, Oryza sativa
MLSENLMNDLQQEELSPRKYILHPLHHISVSSFMILASAYRCSAFKSSTDNLHGENCDFIFRMTKAAAAYSIVLAGATHHLFLSECSFVTLLSHFLLSTGQSILDFAECIKGETRKNMPEAIFSFASCSTNSAKHDSVRYNQFRSTCEKFGKPLLSLSLQCWPFLAQGLPCLEKIKNPIDFSWLGPAIFQAFQLSEEDSFNLSGKHAPATLIEQQKECILSLAVCCITYSKYLASICYGPEHYLANRAKDLLECINHVQ

SEQ ID NO: 53402 - protein, 425 aa, Oryza sativa
MRRVTVLVLLLACAAARAAAAVVTDGLLPNGNFEEGPPKSDLVNGTVVRGANAIPRWETSGFVEYIESGHKQGDMLLVVPQGAHAVRLGNEASIRQRLAVTRGAYYAVTFSAARTCAQAEQLNVSVSPEWGVLPMQTIYGSNGWDSYAWAFKAKMDEVALVIHNPGVEEEPGVRPAHRRRRHQGAVPADAGQGEHAQERRVRGGPLLPPQRVVGGVEFQLSRNQHKSKSSQAFSLNQTPSLPPSFARHGACPGWRPFEWRGEAVVRLRRLAARRQLQGRHPPAGDQRGGRHARQAPREAPRADRRHRRVRRPRGLQPHPARLPHRRARAQAHRLLQRAQRRVRGRRLRPRPRRRRVRRHVHRRWPQRAQRHRRRLQREPPRDLHRRRAQLQRLRHQPHPAPHHRPPGLLTGAPLLPDHHLLPGRH

SEQ ID NO: 53403 - protein, 620 aa, Oryza sativa
MTDNLIDDEIVEVRSHRPTSSTISTTSRRPIYIETEVRTDTVTTRRMASAAANRSVQDVLENTKSPLQDRHSTSYSYAQSGSYAPGSRTGSYDLPVTSRRSVQTNQPAGLVSTIKSVLSQPSQIISNVQNQLTNGYEVIKDRVGQFIGQQTGENSPTRGVTSGGTRYSRTSSQSSASGSRAKGYNLRSRPVHSTPRDNDSDQGTSRKTTKNQKSYQQQGEIDEEEEDYSGNAVNYYFQKYVRLVKRLFRTPRDIYDYLADKLSFSPLWFLLPLLFVLGLYLIPPFACRPFERFLHPKVNTVCKDVTNVAKDFRDNTYDFTRRHTYDRGVRNLKQVYGTYSDLKNSVLSSLNDVYNSLRNSLRGGVGGVKNRVADVVETTAENAKEYYDAGIQKVNNLIDELKQEREKLLGTRHTLNPAQEKELTELLRKYIDEYAADETGQADFALEANGGKVIDTRCQEYTDEPRQNVVKFLGIPIVHMSKQPDIIIKHGRMPGQCFPFKGDHGSIVIRLAVPVVPTEFVVEHLAKSISIVGHINSAPNNFTVYALKDKHDKEGTVLGRYYYDAENGPALQRFKPQIANVPVVEYIEIQVTSNWGNPNYTCLYRFRVHGDMQTVAPTAA

SEQ ID NO: 53404 - protein, 618 aa, Oryza sativa
MTEEVVKEVIIVSTPESSKSTSGDFPVNSLENVDVGSVPSDLKRKEKSVPHYLRASTGSCHDSCKFGAHHSPEPKKYWPVRRRRHQDRANAGCGKQGQDEIQTQKGRSRNKDLELKICLVKDGNVHDKPEFIEVKKPPIEMASDNSETSPCVQDQLSSAEESKRVEDGADLPCGDDKFLIPDGNAACFVDGESSEGAVSIELEMPLAIQDSDASDDHIADAISPPECVYKAGEQLLVDDMCDDGSGNECAGSEKKSTQIVMASEKREKSGHGTKSKSLYNVSVKPKVKETSTATRSNASSQKIVRTLDRKASGTTIESSNGSKVVRATKFNRDKKFRSTVASNVPKVKEIKVTSPATVMDQSSKPTRQSKLKSLVANDAPSPSVNSEKQTDRKMTVMNVAKNARVWQKKEEEKISPVKLSRSINLSSKSLLSIKMRAVKKEKPASLVKSNKKVYGAENAVADVKEKNLKSASPKVRKVEVSKKESRSQKENSATPRTENTRQPKSSTIPAQSPRKLTFRRGKVLNLQSNSESSSTPRRLRFRPAKTVEDSNRSKESTRGRRKSDSAASSGSKDSGSSKPEVVILRHQDVRDKKKNEQGLLNNVIEETASKLVRRGRAR

SEQ ID NO: 53405 - protein, 353 aa, Oryza sativa; identical to SEQ ID NO: 31434

SEQ ID NO: 53406 - protein, 136 aa, Oryza sativa
MISFTKWTTLEECIDASDDFPAITFSLTPFQDVPSLVDKNAFYVDIMGVITEIGATDTLRPKSRNTETLKRTMQIWDASNSTLPITLWGNTAAAFNAEELYNAGQKKPQVIVFVGTVVKNYKGIGLTLNGSSPCKW

SEQ ID NO: 53407 - protein, 637 aa, Oryza sativa
MRDAGEGSDSPPSEMSEDGSGGSGDGDGDGDGGGGGGDRWMPDLRGGNGGGGGGGGGGGRWAPPDQVLENVLESVLEFLTAARDRNAASLVCRSWYRAEAQTRRELFIGNCYAVSPRRAVERFGGVRAVVLKGKPRFADFSLVPYGWGAYVSPWVAALGPAYPHLERICLKRMTVSNDDLALIAKSFPLFKELSLVCCDGFSTLGLAAIAERCRHLRVLDLIEDYIDEEEDELVDWISKFPESNTSLESLVFDCVSVPFNFEALEALVARSPAMRRLRMNHHVTVEQLRRLMARAPQLTHLGTGAFRSEPGPGGALSVTELATSFAASRSLICLSGFRDVNPEYLPAIHPVCANLTSLNFSFANLTAEELTPIIRNCVRLRTFWVLDTVGDEGLRAVAETCSDLRELRVFPFDATEDSEGSVSDVGLQAISEGCRKLESILYFCQRMTNAAVIAMSKNCSDLVTFRLCIMGRHRPDRITGEPMDDGFGAIVMNCKKLTRLSVSGLLTDKAFAYIGKYGKLIKTLSVAFAGNSDMSLQSVFEGCTRLQKLEVRDSPFSDKGLLSGLSYFYNMRFLWMNSCRLTMRGCRDVAQQMPDLVVEVMKDHLDDEGEMETVDKLYLYRSLAGARNDAPSFVNIL

SEQ ID NO: 53408 - protein, 430 aa, Oryza sativa
MPPPFPTATAAASTTSHLALLLLLSSSSVFFLYKSLRLRRNNPPSPPPGQGPAPTPTLLYASATGTSKALAAGLSRRLAEAGVTAHPADAAAFDPDDLPSLPLLLLVLPAARSFSRWLRALGAAEVVAVGEGDVDGGDLEVVFEEWCGRVVRVVKGEEIGEGHNGESDGFDELEEEESDDDDDEEEVDGGEVDMEDIAGKAPAARRRNGKVEGALSNGGENGVRDMVTPIIRTSLEKQGYKIIGSHSGVKICRWTKSQLRGRGGCYKHSFYGIESHRCMEATPSLACANKCVFCWRHHTNPVGKSWKWKMDDPLDIVNAAIDQHTKMVKQMKGVPGVKPERLAEGLSPRHCALSLVGEPIMYPEINVLIDELHRRHISTFLVTNAQFPDKIKTLKPITQLYVSVDAATKESLKAVDRPLFQTSGSVFWIH

SEQ ID NO: 53409 - protein, 309 aa, Oryza sativa
MLNVHSRLQMHKGVSDPLEVVAAEISDEAIILCLDEFMVTDVADAMILNRLFRHLFSKGVILVSTSNRAPDQLYEGGLQRDLFLPFIDTLKERCIAHPIGSAVDYRQLGSAEQGFYFIGKQYSLLKQKLQTLIGDEEPRPQTVEVVMGRQLQVPLGANGIAYFPFEDLCDRPLGAADYFGLFKKFHTLALDGIPKFGSQNRTAAYRFVTLVDVMYENKARLLCTADAAPIELFENIVTVAEARKISPRSSRSQKTDDPDLCVDNELGFAKDRTISRLTEINSREYLEDFEAKLRQPLQGVDNDIDVVLV

SEQ ID NO: 53410 - protein, 77 aa, Oryza sativa
MVCDITLLPIAHNALVLAKKKPVYLFFMYYIFFVAKTKLRVESTVIYLLQVLLFCDSQHYTFTVILPLFQFPKCNVF

SEQ ID NO: 53411 - protein, 61 aa, Oryza sativa
MEVRQRNVCYRLVVWPFAHCTAEQEGSIMALWNRLAPWLHRRLWCPTDGASMDRSFLHSIW

SEQ ID NO: 53412 - protein, 413 aa, Oryza sativa
MARILYLINLVVLFLGFNLHRALSWRNQSYMNDIADRCAPSPHPLSMCQSRAAAFGYPCEEYKVTTEDGYILSLKRIPHGPHDSNTSTEMRPPVLLFHGLMVDGATWVMSTPKQSLGFILADNGFDVWIANSRGTNSSRNHTSLSTKDPAYWEWSWDELASYDLPAVLQFAYDHTGEKIHYIGHSLGTLMILAAFSEHKLLDVVRSAVLLCPIAYLSRTKSKLLKLAAHIFLAETVHWLGFYEFNPVGPVAHEVLSQICGDPEINCYDLFSAVAGPDCCLNTSTFCAFLEHAPQSTSVRNLVHLSQLVRNGGVSRFDYGNAKDNMKHYNQPRPPPYNLSSIPNHVPIFLTHGGEDYLGDVPDTRHLLRTLVKKHNSDSIEVIYVPDYAHADFIMAYNAPELIYGPMVDFFKRH

SEQ ID NO: 53413 - protein, 459 aa, Oryza sativa
MQKASNAFTRGSSSKSRAAKKDKEAATPAATSAAAKDAATPASTSAVRKKAATPATSAAGKAVAGASPGPTRAQPTEEHHQQPTEAPPAEPSPAAAAVQEEAVTSRAQLTEEHHQQPPEAPAEPSPAAVAVQEEAAAAETEAEQEKQPDETPQEVVAAVEEKVQDEQVSTEAAEEAIAVEEDAAAVKTDAPEPEETQTQTGAIAESETEFQRSSEDEPASDAIVEEAAIESATQNEPDEPESTTVEEMAVEEEIKTDESQQEETPKPEERMENSETSVISEDPKEMDAISEDQKVEEPVVAEEQEELSEVVKMAVEPSISSEPATPLEEEDRDDVETEQANSSEPATTVEEEEDRDDVETEQASSSDPATPLNEEAINEEGTSTETGKTKKVAFKGSKVKTAMERRPEGEQPRKKDVARSNDVIEETKRTLMMKRKSKVKALVGAFETVMDTPSPGKSS

SEQ ID NO: 53414 - protein, 538 aa, Oryza sativa
MLQAQPALDVLKKVEKKHRGKAVEDENPEDFIDQDTPNGQKKLLAPQMANQYCPSTVEKSWYAWWESSGYFRADSASTKPPFVIVMPPPNVTGALHIGHALTVAIEDAMIRWRRMSGYNALWVPGVDHAGIATQVVVEKKLMRERNLTRHDIGPDNFVCEVLKWKERYGGTILNQLHRLGASLDWSREAFTMDEQRSNAVTEAFVRLHKEGLIYRDNRLVNWDCTLLTSISEIEVDHIDLKEETMLKIPGYATPVQFGVLISFAYPLEEGLGEIVVATTRIETMLGDTAIAVHPEDKRYMHLHGRYAVHPFNGRKLKIICDAEIVDPSFGTGAVKIAPAHDPNDFEVGRRNNLQFINILTDDGKINSNGGAQFEGMPRFTARICIIEALKAKGLYKGAKNTETSLGICSRTNDIVEPMIKSPQWFVNCNTMAKVALDAVRSKRIEIIPPQYEQDWYRWLENIRDWCVSRQHWWGHRVPAWYVTLEDDQEKTLGSDNDRWIVAKSESAASVEAQKSYPGKKFILNQDPDVLDTCSRNWT

SEQ ID NO: 53415 - protein, 471 aa, Oryza sativa
MAKKQRREAAARRRREQQQQGREQRHHHHHRRRPLLLQPRDERCVSCTTFNILAPIYKRMDSENCRESQYRAYWFSRNEKIIDRLLADCSSIICLQEVWLGNDELVDMYEKRLGDANYSLFKLARTNNRGDGLLTAVNKNYFHVLNYRELLFNDFGDRVAQLLHVESAMPFWQNRSSSCIQQQSLIVNTHLLFPHDHSLSIVRLKQVYKILQYIEAYQEEHKLGPMPIILCGDWNGSKRGQVYKFLRSQGFVSSYDTAHQYSDSEEDAHKWVSHRNHRGNICGVDFIWLLNPNKSRKPLKTSWNEAVFGIIKYLLLQVASLSEENAFALLKADSPDDQITYSSFCQALCQLGMVHPDRLNSEEIKDLWSEADHDGDDIVDYKEFQRCIWSPTCCSQEEEDDTEIDISDGSLVTFEANDEAFGFTVKEAVLFPPEVEKGMWPENYSLSDHAPLTVVFSPVRMPCSPRTPRTP

SEQ ID NO: 53416 - protein, 206 aa, Oryza sativa
MEGAAAAAAVIRHRTVEANGISIHVAEAGGEGGDGAAVLFLHGFPELWYSWRHQMEHLAGRGFRCLAPDLRGYGDTDAPPEIESYSAFHVVGDLVALLDALGLAKVFVVGHDWGAIIAWYMCLFRPDRVTALVNTSVAFMRHVFIRSGADAIKTTDHFHKAYGPTYYICRFQVQYTEPHPLPFPLRTYRFLRFILYTYKLFDCLFF

SEQ ID NO: 53417 - protein, 549 aa, Oryza sativa
MSSEPPPDAAAAAASSAGDLAADLSSATISKKQLKKDARKAEKAEKASQRQQQQQPQADADDPFAANYGDVPVEEIQSKTISGRVWTEIGGLDEAAAGRSVLIRGAAQAIRPVSKKMAFVVLRESMSTVQCVLVASADAGVSTQMVRFATSLSKESIVDVEGVVSLPKEPLKATTQQVEIQVRKIYCINRAIPTLPINLEDASRSEAEIEKAEQAGEKLVRVGQDTRLNYRAIDLRTPANQAIFRIQCQVENKFREYFLSKNFVGIHSPKLIAGSSEGGAAVFKLQYNGQPACLAQSPQLYKQMAICGGFERVFEVGPVFRAENSNTHRHLCEFVGLDAEMEIKEHYFEVCDIIDGLFVAIFKHLNENCKKELETINRQYPFEPLKYLEKTLKLTYEEGIQMLKEAGTEIEPMGDLNTEAEKKLGRLVKEKYGTEFFILYRYPLAVRPFHTMPCYDNQAYSNSFDVFIRGEEIISGAQRIHLPELLTKRATECGIDASTISSYIESFSYGAPPHGGFGVGLERVVMLFCALNNIRKTSLFPRDPQRLVP

SEQ ID NO: 53418 - protein, 111 aa, Oryza sativa
MCSEHIQVSHPFLGKLPTAPQNNLLVPENTQTTSKHIINWYSGHCKCLNHSLRYHCIIFQVTGEDNWVPEVFQIGIVWLHWTRRPDSDAEFSCSQNGTLMTFLKQEKHSCL

SEQ ID NO: 53419 - protein, 863 aa, Oryza sativa
MNFLYRTSQPVAPELPRIPEQDQQRDSLQKPVTTLEGLIADDPYHPSPEDEDTDNGDVDIGGDSADADSKNSVPTGKHTDVLDDEGWITIPNKELPDNWNDLSDMLQLQPLDRPFLFPGEQVHILACMSASKQETQVISPFRIAAVMSKNGNSLQYSTNKSSHATENGDSNVKNGENGSQVVEDDMQSVELNSEMSPMTQDDMQNVELDNEMSPSKQDDMQNVELNNEISPSKQDILETESLLRLEDHKQQIESMLQRFKMSNFFVRIAESDEPLWSNKKLAVSKVPKEQSYSDNQENNKGSRSNAYNTISDKGVFDGSTSGGIARGTARCYALQNGDIVVVLQVNVGVNKMEAPVLEVLQFEKSSSSNYITKNLVNGLSSGDEDPCQELLSWLLPLDRTLPPRSLSPPTLNPSASHKQSYSASGSQIFSLSHFRSYSMPSASSTQPPNIRPPPISESQEFVPEKPAKTPDIINDGQLSFRGVPLEPERYSVRCGLEGVYLPGKRWRRKVEIIQPIEVHSFAAKCTSENLLCVLIKNISPQHVKDIVVLVDAITIVFEEASKGGAPLSLPIASIEVGHGHSLPNLALRRGEEHSFILKPATMSFRDRRTNNDAPLTLSLPKMNGTATNVSLGKVGETIGSLMDQYAVLVSYRCNYTESKLFFKQATSWRPCVASDLMISVSSELSLRNPISSARVPQLPVQVLTLEATNMTSENLTVTVLAPEASGSSSVVSLNSAPTTPNSSYDNLNESVRRSGLGKHRAGFRRMNSVLAGSPKESDNGGNRISTSGGCTHLWLQSAVPLGCIPARSSTTVKLELLPLTDGIITLDTLQITIREKGILFLASIVKTQRKKNKLVALEEHFFF

SEQ ID NO: 53420 - protein, 471 aa, Oryza sativa
MESKPSRNVVLYAAMGAGHLLPMVELAKLFLTRGLDVTIAVPATPGSGTTGSPTIAGIAASNPSITFHHLPPPPSCADPDPNPLLLMLDVLRRSVHSLASLLRSIPSVAALVLDIFCAEAVDAAAALHVPAYIYFTSAAGAFAASLGLMHHYSTTTTNLRDMGKALLRFPGVPPIPASDMPSLVQDREGRFYKARVKLYARAMEASGVLLNTYEWLEARAMGALREGACSPDRPTPPVYCVGPLVASGEEEGGGVRHACLAWLDAQPARSVVFLCFGSMGSFSAAQLKEIARGLESSGHRFLWVVRSPRQDPANLLEHLPEPDLAALLPEGFLERTADKGMVVKSWAPQAKVLRHAATAAFVTHCGWNSTLEGITAGVPLLCWPLYAEQRMNKVFIVEEMKVGVVIDGYDEEMVSAEEVEAKVRLVMESEEGGKLLERLAVARAKAVEALAEEGPSRVAFDEFIDRLVTSE

SEQ ID NO: 53421 - protein, 523 aa, Oryza sativa; identical to SEQ ID NO: 52550

SEQ ID NO: 53422 - protein, 726 aa, Oryza sativa
MGENTGDNPNMSILQRIATSDVPLVKEYGLPGIIGAILLAVVIPIMLSSIFNKKGKKRAVQADVGGEAGLAMRNSRFSMLVEVPWEGATTMAALFEMASKKYPRHRCLGTRKLINREFVESPDGRKFEKLHLGEYEWDTYAEAFSRACNFSSGLIKLGHQRDSRAAIFADTRTEWIIAAQGCFRQNLTVVTIYASLGEDALVHSLNETQVSTLICDSKQLKKLPAISSKLQSVKHVIYIEDEPVEAEVLNQMKHWTTFSFGEVEELGKTSHTDARLPSSTDTAVIMYTSGSTGLPKGVMITHGNMVATTAAVMTIIPKLGTGDVYLAYLPLAHVFELAAETVMLASGAAIGYGSALTMTDTSNKIKKGTKGDVSALKPTLMISVPAILDRIRDAVFKKVGEKGGLTKKLFDIAYKRNLGAIEGSWFGSWAPERMIWDNLIFKPIRSMLGGRIRFVLCGGAPLSSDTQRFMNICLGVPVGQGYGLTETCAGAAFSEWDDTSVGRVGPPLPCCYVKLVSWEEGGYKISDSPMPRGEVVVGGYSITKGYFNNEAKTNEVYKVDERGMRWFYTGDIGQFHPDGCLEIIDRKKDIVKLQHGEYVSLGKVESALTTSNYVDSIMVYADPFHNYCVALVVPAHQALEQWAQNSGINYKNFDELCHNDQAIKEVQQSLSKAAKAARLEKFEIPAKIVLLPEPWTPESGLVTAALKLKREQIKTKFKDDLGKLYH

SEQ ID NO: 53423 - protein, 447 aa, Oryza sativa
MDEEYDVIVLGTGLKECIISGLLSVDGLKVLHMDRNDYYGGESTSLNLTKLWKRFKGNETAPEHLGVSKEYNVDMVPKFMMANGALVRVLIHTSVTKYLNFKAVDGSFVYNNGKIHKVPATDVEALKSNLMGLFEKRRARKFFIYVQDYEEDDPKSHEGLDLHKVTTREVISKYGLEDDTVDFIGHALALHRDDNYLDEPAIDTVKRMKLYAESLARFQGGSPYIYPLYGLAELPQAFARLSAVYGGTYMLNKAECKVEFDENGKAYGVTSEGETAKCKKVVCDPSYLPDKVKKVGRVARAICIMKHPIPDTKDSHSVQIILPKKQLKRKSDMYVFCCSYAHNVAPKGKFIAFVSTEAEADKPEIELKPGIDLLGPVEETFFDIYDRYEPTNTADEDNCFVTNSYDATTHFETTVKDVLALYSKITGKELDLSVDLNAASAAESEAA

SEQ ID NO: 53424 - protein, 809 aa, Oryza sativa
MAATAASTMSAAAAVTRRINAALRVDATSGDVAAGADGQNGRRSPVAKRVNDGGGGKDDVWVAVDEKDVCGARGGDGAARPPLFRTYKVKGSILHPYRFLILLRLIAIVAFFAWRVRHKNRDGVWLWTMSMVGDVWFGFSWVLNQLPKLSPIKRVPDLAALADRHSGDLPGVDVFVTTVDPVDEPILYTVNTILSILAADYPVDRYACYLSDDGGTLVHYEAMVEVAKFAELWVPFCRKHCVEPRSPENYFAMKTQAYKGGVPGELMSDHRRVRREYEEFKVRIDSLSSTIRQRSDVYNAKHAGENATWMADGTHWPGTWFEPADNHQRGKHAGIVQVLLNHPSCKPRLGLAASAENPVDFSGVDVRLPMLVYISREKRPGYNHQKKAGAMNVMLRVSALLSNAPFVINFDGDHYVNNSQAFRAPMCFMLDGRGRGGENTAFVQFPQRFDDVDPTDRYANHNRVFFDGTMLSLNGLQGPSYLGTGTMFRRVALYGVEPPRWGAAASQIKAMDIANKFGSSTSFVGTMLDGANQERSITPLAVLDESVAGDLAALTACAYEDGTSWGRDVGWVYNIATEDVVTGFRMHRQGWRSVYASVEPAAFRGTAPINLTERLYQILRWSGGSLEMFFSHSNALLAGRRLHPLQRVAYLNMSTYPIVTVFIFFYNLFPVMWLISEQYYIQRPFGEYLLYLVAVIAMIHVIGMFEVKWAGITLLDWCRNEQFYMIGSTGVYPTAVLYMALKLVTGKGIYFRLTSKQTTASSGDKFADLYTVRWVPLLIPTIVIIVVNVAAVGVAVGKAAAWGPLTEPG

SEQ ID NO: 53425 - protein, 389 aa, Oryza sativa
MAIGAFVEGGGSGYSGRVTPFVVLSCIVAGSGGILFGYDLGISGGVTSMEPFLKKFFPDVYHQMKGDKKKVSNYCRFDSELLTVFTSSLYIAGLVATLVASSVTRRFGRRASILIGGSVFVAGSVFGGAAVNIYMLILNRVLLGIGLGFTNQSIPLYLSEMAPPQHRGAINNGFELCISIGILIANLINYGVDKIEGGWGWRISLSMAAVPAAFLTVGALFLPETPSFVIQRSGDVDSARALLQRLRGTAAVHKELEDLVMASEVSKTIRHPLRNMLRRRYRPQLVIAVLVPLFNQVTGINVINFYAPVMFRTIGLRESASLMSAVVTRVCATAANVVAMAVVDRLGRRRLLLVGGVQMLVSQVMVGAILAGKFREHGRRWRRSTRTWC

SEQ ID NO: 53426 - protein, 683 aa, Oryza sativa
MGARWGPRRATVGPHLRDALRHLLFVFLVLLQAQAGRGGATLNGEGMALLELRERVEADPHGALRDWDPADATPCRWSGVHCFDGKVEILNLTGRELVGTLAPEIGRLQLLKSLILRNNNFRGKIPKEFGGLTALEVLDLSSNNLDGTIPEELMAMPLLKQLSLHDNQFQDDISSLHIQDISDEQAGCLSRKLGCWAGFKDWTSFSDLREKYSTNLASNRTFKSLGEPHIMQNLQSFASAVGRRLLGEVGNLPALSGNYAKSSGPVNSEEIQRTIDVLSLGSGSFSAFPNSEAEVLESAVNTDAAAMQSGAANQSTDEVSGSKHSKWAYFMIIPAAILLISLIVAPILVWRKRGRAAIGPWKTGLSGPLQKAFVTGVPKLNRPELEAACEDFSNIINTFPSCTVFKGTLSSGVEISVVSTAILSLKEWPKSSETCFRKQIDTLSRVNHKNFINLLGYCLENQPFMRMMVFEYAPNGTLSEHLHLKEFEHLDWAARMRIIMGVAYCLQYMHHDLNPPVAITDMRSDTIFMTDDYAAKIADVGIWKEVAIKAKTAKEDSSSRSECPPDIASNVYCFGTLLIEIISGKLPEADDQKSMCNWAAEYLKGKSYSKLVDASLKEHNANELEAVCEVIQECIDPDSDQRPTMRDATRKLRQALNISPEAATPRLSPLWWAELEILSAEAT

SEQ ID NO: 53427 - protein, 452 aa, Oryza sativa
MMAAPQLPCCTRLAPPCPGKAAAEARTLARSRFRCCAGAARPRSFQKKDSFLDLHPEVTLLRGGDEAAVVATRKGSPNGSPLEGLGAPPDHCDYDGAKIKVVGVGGGGSNAVNRMIESSMNGVEFWIVNTDVQAIRMSPVLPQNRLQIGQELTRGLGAGGNPDIGMNAAKESVESIQEALYGADMVFVTAGMGGGTGTGGAPVIAGIAKSMGILTVGIVTTPFSFEGRRRAVQAQEGIAALRNSVDTLIVIPNDKLLSAVSPNTPVTEAFNLADDILRQGIRGISDIITVPGLVNVDFADVRAIMQNAGSSLMGIGTATGKSRARDAALNAIQSPLLDIGIERATGIVWNITGGADMTLFEVNSAAEIIYDLVDPNANLIFGAVIDPSLNGQVSITLIATGFKRQDEPEGRTTKGGQQTQGDNGRRPSSAEGSMIEIPEFLRRRGPSRFPRV

SEQ ID NO: 53428 - protein, 625 aa, Oryza sativa
MGMEVVGTEAAPAEVKVTDGEVNLFQENESKATAKEREEAVLFGSDNSTATANGAANGADLAPPKDAEEDWPEARKTHSFFFVKIRLLEDPKLKMKIDQAEKDFQKKIQARSQIFEAIKAKKNERFGIISELKPLAAENKQYNEAVSEKLKAIEPLRNRLGKFRDENNAIRAQGAGICSSIEELEKSIKRLNDRISHESIPLDEEKRLIKQIRELEKTRPKVISTSANRAQIQDTVVERDAIQDQVKIIGEGIDGVKKERQAVRSKIKVLEDELKAIDMEMGSLQEDLTAANARKDKAHESLVQLRHARDAYNASFHQNRQLLSKARDLASRSELAQVQELYKTQVDKFVAEWCNSKAFREDYEKRILSSLNSRQLSRDGRMRNPDEKPIFIETEAAAPPVEQEPIQSKMPAKQAKEAPAPQAEVSPKDESRVKAIAKPSKAKSSLDADDDYEAESPKEKPKPKEVDVAKLKEIKRQEEMEKNRLALERKKKLAEKQAAKAAARAQKEAEKKLKREEMRARRRAGAADTEASTESDNRSDGAGGGTSRGRLRSCFCSGDERTEGECPVQQKRRDQEQGPAAEGDPEEEESPVVLVLGWPCCCSGRRARRPACRARLLPVLPPSER

SEQ ID NO: 53429 - protein, 122 aa, Oryza sativa
MVDKNDGSEGLKFNTSHLMQTTEEVARAFIAAASAATVQSTRPSVVYSSREESGSPMQKLQQQFSKILKGFSTSPEVSGSYNPEVLTTQKRQWSRFQLKSLVCIAFSIYMLVDILLQINFGL

SEQ ID NO: 53430 - protein, 122 aa, Oryza sativa
MPLALLARAALSSTSSSIAMATTRSSSSRVLRASRAELNPGAKEVKRESSVSFDLTKTEAVASMRSKNVKRVLEVTGENIKKEVDIVPDIEDFRYGKASPSLVRLEKKVRVSSAIKGTQKTT

SEQ ID NO: 53431 - protein, 626 aa, Oryza sativa
MTVEERQGRVGGHGVSGGGGGRDQFPVGMRVLAVDDDPTCLKILENLLLRCQYHVTTTGQAATALKLLRENKDQFDLVISDVHMPDMDGFKLLELVGLEMDLPVIMLSANGETQTVMKGITHGACDYLLKPVRLEQLRTIWQHVIRRKNCDAKNRGNDDDAGQKAQGMNNEGESIGANRNKRQSRKSRDENGDDGDDSDENSNENGDSSTQKKPRVVWSVELHRKFVAAVNQLGIEKAVPKKILDLMNVENITRENVASHLQKYRLYLKRLSTDASRQANLAAAFGGRNPAYINMNSFGNYNAYGRYRTVPTAGHTQANNILTRMNSPSAFGVHGLLHSQPIQLGHAQNNLSTSLNDLGGLNNGNMIRGAQMSTILTGPSGNSFPNISNGAPLATANRSLQPLESSNQQHLSRVHSSSADPFSTLVGESPQFPDLGRTTNTWQTAVPSNIQDRGHNDNMSQATLHMNGPKIEPVSSFTSSNQIPLLGNEMQGQVASLASNVPIAFNQDTSPFNYGSSTNSRDMLNNSHVFSNSSINTSLPNLSLDNPAVPRQTLDRGNTGIVSPMQDGRIHHQAVSNQLNYNDDLMRTTGLQRGLSGGLDDIVVDMFRPDREDDGVPYIDGDWELV

SEQ ID NO: 53432 - protein, 331 aa, Oryza sativa
MIRGLAAHDSGKHLVLRRRAAASQLTLYCTAIGGIGAALMAAFMYHMLRRTDQLTGLWVVSIFSGLIWFIGICHGLFTNRPSSSSPTTAFEPNFFTKLSYSMTLVRYPQAIGSLVAVFLSSFATMCIFTSGTLYAIGGVCIKPVLVLVLWILYFLFPLISLPLLHPIQIVIRADAVRMQLLGFIICLFVSGAGFYFKSHRWRAAHIIVIALVQSTANGVLYSFGRILLLDASPPGKEGAFAVWYAFVRCIGAMIGFAAASAGPGRAGGSFAAAFLGSFLGIIVLIFGNVSNIGALKAAGHLKGMEDEKRLGMEKGEGMSAVADSGEGRGRV

SEQ ID NO: 53433 - protein, 1023 aa, Oryza sativa
MSCSSSSVHGFLWLMLVYASCAAVQAQQAARTDPAEVAALNTILGRWGLRASPAWNISGEPCSGVAIDETGVDNNPNINPAIKCDCSFNAGTVCHIIRLRVFSLNVVGQIPEELQNLSYLNNLDLRRNYLTGPLPSFIGNFSAMQYLAVSLNPLSGPLPKEIGNLRNLLSLGISSNNFTGELPAELGNLEKLEQMYIISSGFSGPFPSTFSKLKNLKILWASDNDLTGKIPDYFGSFPNLQDLRFQGNSFQGPIPASLSNLTRLTSLRIGDILNGSSSLSFISNLTSLNVLILRNCKISDNLGTVNFSKLAGLTLLDLSFNNITGHVPQSILNLDKLSFLFLGNNSLSGSLPYDKSPSLNNLDFSYNHLSGSFPPWVTGNNLQLNLVANDFILDSTNNSILPSGLNCLQQDTPCFRGSPEYYSFAVDCGSNKSTRGSDNTLYETDAQNIGAASYYVSDNARWGVSSVGKFNEASNGSYAIYSPQQFQSALNSELFQTARMSPSSLRYYGIGLENGNYTVSLEFAEFVYPNSLTSNSIGRRVFDIYVQGELKEKNFNIRKMAGGKSLIAVNKRYTATVSKNFLEIHLFWAGKGTCCIPTQGHYGPTISALSVTPNFIPTVQNGVPKKKSKAGTISGVVIGASFFGLAVLVGLFMLLKKRRRTSQRKEELYNMVGRRNVFSNAELKLATENFGSQNILGEGGYGPVYKGILTDGRVVAVKQLSQSSQQGKSQFVTEVATISSVQHRNLVKLYGCCIDSNTPLLVYEYLENGSLDQALFGDGRFNLGWSTRFEIILGIARGLSYLHEEANVRIVHRDIKASNILLDPDLTPKISDFGLAKLYDEKKTHVNTKVAGTFGYLAPEYAMRGHLTEKVDVFSFGVVALETVAGRSNTDYSLVEDKKYLFEWAWGLYEREQALGIVDPRLEEINEEEVLRVIRMSFLCTQGSPHQRPPMSRVVAMLTGDIPVSDVVAKPNYIIELQLRGRNSSHVTTGYSGSTADELSGQRETSPLTPSLEINREIIDDGR

SEQ ID NO: 53434 - protein, 691 aa, Oryza sativa
MMPAGSASLLLECYGGDPPLSSMEGTSSGEEVEDGTGPSPEAEEDDDPAPYVGQRFPTHDAAHELYSGFARRRGFSIRRHRTEGKDGVGRGLTRRYFVCHRAGNPPAKPFAAGAGDRPQRNRRSSRCGCKAYMRIGRSAIAAAAAGEAEGEWRVTGFSNHHNHELLGQDQVRLLPAYRVVSGDDRDRILMLARSGISVQQMMRIMELERRVEPGNLPFTEKDVRNLIQSCRKSDQEESVDLIKMCRRFQEKDPDFKYEFTKGASNRVENVAWSFASSVQSYEMFGDAVVFNTTHRLPALDMLLGIWVGLNNHGMPCFFGCAFLREESLQSYAWALKVFLNFMNRKAPLTILTDENMYLKEAIEKELPGTKQALCIWLIAARFPSWFDAVLGERYNSWKDEFDRLYNMESTMEFDLGWSDMMNSYGLHGNGHIASLFASRTLWALPYLRGQFFAGLLASPETSKSISVFIQRFSSAQTRLAHFIEQVAVVAEYKDQAGRQQMMQHNLQSITLKTATPMERHAAAVLTPYAISKLQDELVVACQYASFHLEGNVFLVRHHTKTEDGGCNVTWSQREELISCSSNMFESAGILCRHGLRVLSTLNYFQIPDHYLPPRWRRTWPSPSKALNGAYFHESPEIGRVKALQSMVSALVSEASKSTERMDIATREVSALLSRMRQQPVVMHVSGDGVHK

SEQ ID NO: 53435 - protein, 979 aa, Oryza sativa
MYGQGGNFNPQYRHAAPPPPPQQAGVTGGFPQQPLPPPPPRMAQYPQPPAMAAPPPGPYQHRMPLVQNQAYPFAQMHQMQMLPQQRGYAQMPMPGPPSQPPPPQAMYQAHPQYPMPGSLPPPPPRPPSFAPENALPPSSPPPPSPPPPPPSSPPPVPPSPTAAPTTGQSWNSEPERKEGATATDVGHDVKTEKVTNQLIVSDDSDMDMDADEDSPSREHVSPINSSLATAECTGNVNTRKPACDVSNLVKDSGGKAKTTNVTDEGRSTFQLIQGYASDDSEDEDGACAVSNLVPLTENNEPVHSIGTNPDIGHQLLTEAAPCTERSLEDREHQLMSKSNPVKHDSDELGHPVKEDLSGNDSDRGQQTRRHGRSQWKRSRGQSPQGRRSCSPLSQSLSSGRQSNSPLAKRANLLESKSPDGVGQTFRAQPGVKLGISKDGFYNDKHDSPVKVATPFDIHPAGGHISGDRISEQDGLMGTKKFNGSPDDIDCNEKTNDASVGSFGPHGHGAVLTCGPSQSVASSANGSDPHKMQRSGRASIPQSDMDKSSLGAHQSLSSQPPGISFATVHATEKNMMCDVLQPHSQNLCPPGQMPSGLRPAHIPSSNITPLPGQQLLSTPEFPQMHFQPNVMAPANEFLQSQMQTYPAPDLPHPRPLDFHPHTLQPVVPPHQQPAAMVHSSFQRFTPNLPGSTEFGAISDTDLPKSSIKPHYNPFASTFEQTDPTLNIGCDVIPNPVESASTKAAEHANALSPFGLSVPGSGTHVRENSAEVVSSRQKQPHREFTSSAPYDPLLDSIEPSSSSINKMDLGREANLSASNHNASKIVNIEVESKNMHGLGLVAESEVEEFGEVAADTEAGVVDNLSPEPLGAKDWSSDMPGDIDNDESVDKNKRTKDSRSMKLFKVAIADFVKEVLKPSWRQGNISREAFKTIVKKTVDKVSSSVPNNHIPKTPAKIKQYVQSSQKKVTKLVMGYVDKYVKL

SEQ ID NO: 53436 - protein, 623 aa, Oryza sativa
MKSPLLRLKGFGHHQQHRERKSRQPQPQPTPAKLDELADAAQDVEEMRNCYDGFISAAAATTNGVYEFAEALEELGSCLLAKPVLNDDDDDSGRVLMMLGKAQYELQKSADRYRTNIIHTITTPSESLLKELQTLEEMKQQCDMKRDAYETMRASYSDKGGSRHSKTESFSTEQLDASFLEYQEDSALFTFRLKSLKQGQFQSLLTQAARHHAAQLSFFRKGLKCLEALEPRVKAISEKHHIDYNFSGLEDDGSDNDGYSTYDSCSDDGELSFDYEINDRDQDFLTSRGSMDFDKSDQTTSPKPIKENKQEEAKQAEAEIVFPQLKPEFATHSAPLFAGNLLDETDRLRQMRPSSTKHSYRLPTPVGADNPVPSGSHRLHHSAQFFETKPHAPTNLWHSSPLTKDYNGAMHNAATKPSSSSSTDDLKKLKRESWSGPIPIKAGSGGKPFSQADHRPSPTMAYPGAMPAAKPHVRHASSSSVSPKVSPKMSPVPPASSLKISELHLLPLPPANVDPVRPSGLVGYSGPLVSKRAPTPARASPKASRTASPLPRPPAALARSYSIPSNSQRTPIITVNKLLEAKHSREGSDASSPPLTPLSLSDLCHQEKAGKAAAGNTRRKETL

SEQ ID NO: 53437 - protein, 583 aa, Oryza sativa
MSSKSPLQSMPGQAAKPKGTGEQGGDAEVVSEERTPSDQHQGSPASTLDKELSGLSSESGILDDSLVAEEEDSGELKEIQNLDCNGNQEKKTSQKSSTSDSFASAKVSDGTNSLRKTSGSAKTSDRANFTESGKSSMCRASTSSDISDESSRSSMSSATTKPHKGNDSRWEAIQTVKTKDGILGLNHFRLLKKLGSGDIGSVYLSELSGTRSYFAMKVMDKASLASRKKLLRSQTELEILQSLDHPFLPTLYTHFETDKFSCLVMEFCPGGDLHTLRQRQPGKHFSEQAAKFYVAEVLLALEYLHMLGIIYRDLKPENVLVREDGHIMLSDFDLSLRCSVSPTVIKSANPGLDALQRNNAAYCVQPACIEPSCIQPSCVAPTTCFGPRFFKSKSKSKSKKEKSKPEAANQASLFPELIAEPTDARSMSFVGTHEYLAPEIIKGEGHGSAVDWWTFGIFLYELLFGKTPFKGSGNRATLFNVVGQPLRFPESPIVSFSARDMIRGLLVKDPQHRLGYKRGATEIKQHPFFEGVNWALIRCASPPDIPKPVELDCRPKQVPSTNGKVAPASNQKGSDNYLEFEFF

SEQ ID NO: 53438 - protein, 62 aa, Oryza sativa
MPINNKCLFPSIFLESSHLLMWLYQAQDALEVSGVLTVMTLGMLVKHLLATYSVYPLNTIKY

SEQ ID NO: 53439 - protein, 362 aa, Oryza sativa
MDRAALTVGPGMDMPIMHDGDRYELVRDIGSGNFGVARLMRSRADGQLVAVKYIERGDKIDENVQREIINHRSLRHPNIIRFKEVILTPTHLAIVMEYASGGELFERTCNAGRFSEDEARFFFQQLISGVSYCHSMQVCHRDLKLENTLLDGSTAPRLKICDFGYSKSSVLHSQPKSTVGTPAYIAPEVLLKKEYDGKIADVWSCGVTLYVMLVGAYPFEDPDEPKNFRKTIQRILGVQYSIPDYVHISPECRDLIARIFVANPATRISIPEIRNHPWFLKNLPADLMDDSKMSSQYEEPEQPMQSMDEIMQILAEATIPAAGSGGINQFLNDGLDLDDDMEDLDSDPDLDVESSGEIVYAM

SEQ ID NO: 53440 - protein, 572 aa, Oryza sativa
MPDWRVGEFEGKLKDGFARSNNSEHENGAGTVSISSKKSKHRVDSEKKPHVDISGVIDSDSQKCNSEQIHSANGIVSRDVNHDHIENCKVESNDFPLNTISETRYPTDNWNSSQFALSNDGSPVLNNQSTPQTGHGYGDNDLTYIDWPAIDNFEDVDNLFRRCDSTYGQQQLPNTDELSWIPSSDAMYSSDVAMQPGFESSYSDYGILDDLSAFNCTEDKSLTTADPSSAVCDEQFDDSYLFNEQKPEDVYGEQAYQRDAMELLSSDQICTGQENLDMIGNRYSSENAMEQPEDQKFSIASGSQLSSSQNLLNQKNHLDSTSPSNITSESYPERNCQIIPSGASFAERNLKVQKKVASSASGQLISDNVTGHPGHQTLTRRASYPCENHEIGKRSLGKRGLGHSDVAMGTSMVVDGSFVSSISSDNSVEENSFRQLQDAVSQLDVKTKMCIRDGLYRLARSAQNRQVFPNTMNNNGDSHNVKDMQNAETSGKFVDPGSIETQTNPIDRSIALLLFHQPSEHVTGAVDEAASLKSHNDNHQAAAKNQRVMHASSVHSPRGQGDPMDAKSCRNN

SEQ ID NO: 53441 - protein, 391 aa, Oryza sativa
MEDMVTEILVRLPVKSLLRFKPACRAWQAIIDDPVFIRAHLRRSASRWEQSHSFIINPHSMVRVPWDRWPVPSNRYRFHQWQLQRGTTTTSPRNNNVATFLHAKDLSDDQQFYTTEFTHRDGLVFSTTTTSLHVFNPATRDAITLPTSSRSNLMGGGRFNYHCSGLGLDPRTGMYKVVQAFFRFQSMEPAETKMGMEVFTIGGGGGGAGWREITSDPPYPAKRFQIGVSVCGYMFWRFSERHTKLERGILHLSLEEEEFGITGLPDELDTDNSFLLDELLGRDLCVSASNTSCTMLNIWTLPVADESLCTLWQWRYCIDYPWSLCSVMALPPFSDKIILLRGNNICRYDLATSKLKILCRLDRTRYQGEGARKSELFSAMPFIESLVRITY

SEQ ID NO: 53442 - protein, 698 aa, Oryza sativa
MLPLSPDLGGRFDRALWQSYVSANKIFADKVLEVINPDDDFVWVHDYHLMVLPTFLRKRFNRIKLGFFLHSPFPSSEIYKTLPVREELLRALLNSDLIGFHTFDYARHFLSCCGRMLGLSYESKRGHICLEYYGRTVSIKILPVGVNMGQLKTVLALPETEAKVAELMATYSGKGRVVMLGVDDMDIFKGISLKLLAMEELLRQHPEWRGKLVLVQVANPARGRGKDVDEVKGETYAMVRRINEAYGAPGYEPVVLIDEPLQFYERVAYYVVAEVCLVTAVRDGMNLIPYEYIVSRQGNEALDRMLQPSKPEEKKSMLVVSEFIGCSPSLSGAVRVNPWNIEAVADAMESALVLPEKEKRMRHDKHYRYVDTHDVGYWATSFLQDLERTCKDHAQRRCWGIGFGLRFRVVSLDLSFRKLAMEHIVMAYRRAKTRAILLDYDGTLMPQAINKSPSANSVETLTSLCRDKSNKVFLCSGFEKGTLHDWFPCENLGLAAEHGYFLRSSRDAEWEISIPPADCSWKQIAEPVMCLYRETTDGSIIENRETVLVWNYEDADPDFGSCQAKELVDHLESVLANEPVSVKSTGHSVEVKPQGVSKGLVARRLLASMQERGMCTDFVLCIGDDRSDEEMFQMITSSTCGESLAATAEVFACTVGRKPSKAKYYLDDTAEVVRLMQGLASVSNELARAASPPEDDDE

SEQ ID NO: 53443 - protein, 471 aa, Oryza sativa
MGRGSHGCSVLGSSLLLLFCLGSAAAQKASTWKTLSGNPPAIIAKGGFSGLFPDSSDFAYGFVAAASSPDTALWCDVQLTKDGAGICLPDIRMDNCTNIANVYPKGKKTYSVNGVSTPGWFSVDYDSTGLSKVNLVQSLFSRVPYYDGTLPILPVESVFANYKAPAVWLNVQHDSFYSQFNLSMRSYILSVSKQYIADYISSPEVNFLTSLSGRVNKKTKLVFRLLNELAVEPSTNQTYGSMLKNLTFIKTFASGILVPKNYIWPVTQDNYLQPSTSVVGDAHKAGLEVYAADFANDFLLSYNYSYDPLTEYLNFIDNGAFSVDGVLTDFPITPSEAIGCFSNLNNSKTDNAKPLIISHNGASGDYPDCTDLAYQKAVTDGADVIDCPVQVTKDGIPICMSSIDLMDVTTVSTSQFSSQTTVIKDIKNGAGVYSFNLTWDDIAKNLKPKISNPMTTFDVYRNPRNKNAGVS

SEQ ID NO: 53444 - protein, 818 aa, Oryza sativa
MGVFDRLPPMDRLRSEKMCFVQLIIPAESARLAVTYLGELGLLQFKDLNEDKSPFQRIFVNQVKRCSEMSRKLRFFNDQINKAGVKSSVRPAMQPDIDLEELEAKLREHENDLLEMNTNSEKLLQTYNELLEFKMVLSKAGGILASSHNHAAPAERELDEHIYDKEMDDGNAYLLEQGVHLGASENSGVKFVSGIILKSKAMAFERMLFRATRGNMFFNQAPAGEPVTDPISGEEVEKTVFVVFFSGDQAKAKILKICGSFGASCYPVPEEMVKQRQIFREVSGRLADLEATLDAGIQHRNKALESVGSQLWRWTIMVKKEKAVYDTLNMLNFDVTKKCLVGEGWCPIFAKSQIKDVLQRATLHSNSQVGIIFHEMDTIDSPPTYFQTDKFTNAFQEIVDAYGIARYEEANPAVYSVITFPFLFAVMFGDWGHGICLLLGACVLILREKKLSSQKLGSFMEMAFGGRYVILLMALFSIYCGLIYNEFFSVPFHIFGKSAYECREKTCSDAHTAGLIKVRDPYPFGVDPSWRGSRSELPFLNSLKMKMSILMGVTQMNLGIVLSYFDAKFHGNALDIRYQFIPQMIFLNSLFGYLALLILIKWCTGSQADLYHVMIYMFLDPSGNLGENQLFWGQKELQILLLLMAIVAVPWMLFPKPFILKKLHKERFQGHTYRFLGTSEMDPDSEPDSARSRHDDFNFSEVFVHQMIHSIEFVLGAVSNTASYLRLWALSLAHSELSTVFYEKLLVLAWGYDNLVVKLVGLVIFSFATAFILLGMESLSAFLHALRLHWVEFMNKFYHGDGYKFRPFSFALLADDED

SEQ ID NO: 53445 - protein, 934 aa, Oryza sativa
MRGVQDRKQKKKQDLQVLGPFPGCLGRMINMFDLSNGVVATKMLTEKAHRDVSPAGKDRGNAFKMAIGPFSSQIEDKKRDSQPRKQSPTKRLSSPTKRSGEAPVKLLMEQDMWKEGMSGEEPLNVVARLMGLNDAAGHQSDLKSGKRSDKEYRSGGFDENSRNLRPKKDSKGHPNQKAGTHSEPCSGFSDQTLRMNSSRNKHQGKEPSCEKRMTLVREKFAEAKRLATDEKLLHTKEFQEALQFLSSNKDLFLKFLDEPNPLLSHNNYEFQPDTPPSETKQITILKPSDSIKRNGNTLVGRQLYSDGDESEGNRCRRHQSLSVSPTNSTLSEPTRIVVLKPGLVKSQEPKILRSPSSSSTAADSEDDSMSAVDETVPSSRRLAEEITWQMRMRLKDKQDEENLLSYEFHDIYIGDDSFSKSEVENAKEVSGEISEDLEFGTPTSGRSWDFLSRSGSPYSASCSSQTSHRREPSVVREAKKRIFERLSIVSSTVGGEEEREARRSMGTLGEMLTIPEVKKDQEVFGGVTLENPSPEMDSEEPFLCLPRSRSVPISLSFGGTELNGVATGCQEAEKEKNRKSLSFREKVSSLFSKNRKVARGKLDPSGIPSTDDRLKHGNSATVNDFSENADHSALDNPLNCTIQNVDDISMPRLMASSWHMNDMENMPAKDISSIPVIGAPGIFGESQDQPSPVSVLDGPFLSDNCRSLLCSSESFITASPQALSRSPLIGSFSRSLSWEDPPLEVMSPNSLRLSRLFSKADEDQDSLTFIQKLVCSAGIDREGCMLSGPLELYLLEKFSDYQEEGTKLRERRSKEKFLFDAVNEALTELTWTAELMAYPLGRSSSLERKDCENAFSNSAADEIWRVIRNWSILDKYPPGETIERNLLVEMILKREVLEAASSDTTRLETFELTSMVCTMVLEDLIADAVVDLSA

SEQ ID NO: 53446 - protein, 277 aa, Oryza sativa
MSGGSSPRSRRSSFNSLSRDLELPSEQGCLSVIVLGASGDLAKKKTFPALFHLFAQGFIQSGEVHIFGYARSNLSDDGLRERIRGYLKGASEEHLSDFLQHIKYVSGSYDSGEGFEKLNKEISEYEKSNKSESPRRLFYLALPPSVYPSVCKMIRTYCMNPSGWTRVIVEKPFGKDLDSAEELSAQLGELFDENQLYRIDHYLGKELVQNLLVLRFANRLFLPLWNRDNIDNIQIVFREDFGTDGRGGYFDQYGIIRDIIQNHLLQESILNMCQHSI

SEQ ID NO: 53447 - protein, 808 aa, Oryza sativa
MAAKLARLHSLRERLGATFSSHPNELIALFSRYVNQGKGMLQRHQLLAEFDALIEADKEKYAPFEDILRAAQEAIVLPPWVALAIRPRPGVWDYIRVNVSELAVEELSVSEYLAFKEQLVDGHTNSNFVLELDFEPFNASFPRPSMSKSIGNGVQFLNRHLSSKLFQDKESLYPLLNFLKAHNHKGTTMMLNDRIQSLRGLQSSLRKAEEYLMGIPQDTPYSEFNHRFQELGLEKGWGDCAKRVLDTIHLLLDLLEAPDPANLEKFLGTIPMMFNVVILSPHGYFAQSNVLGYPDTGGQVVYILDQVRALENEMLLRIKQQGLDITPKILIVTRLLPDAVGTTCGQRVEKVIGTEHTDILRVPFRSENGILRKWISRFDVWPFLETYTEDVANEIMREMQAKPDLIIGNYSDGNLVATLLAHKLGVTQCTIAHALEKTKYPNSDIYLDKFDSQYHFSCQFTADLIAMNHTDFIITSTFQEIAGSKDTVGQYESHIAFTLPGLYRVVHGIDVFDPKFNIVSPGADMSVYFPYTEADKRLTAFHPEIEELLYSEVENDEHKFVLKDKNKPIIFSMARLDRVKNMTGLVEMYGKNAHLRDLANLVIVCGDHGNQSKDREEQAEFKKMYGLIDQYKLKGHIRWISAQMNRVRNGELYRYICDTKGVFVQPAFYEAFGLTVIEAMTCGLPTIATCHGGPAEIIVDGVSGLHIDPYHSDKAADILVNFFEKCKQDSTYWDNISQGGLQRIYEKYTWKLYSERLMTLTGVYGFWKYVSNLERRETRRYIEMFYALKYRSLASAVPLAVDGESTSK

SEQ ID NO: 53448 - protein, 121 aa, Oryza sativa
MATARRRRRPRRRVRPPPAATPSSAPRLAAAGTGASTPPPPRPRRRMWSGWRWGRRRERGTCSPVDLAVLEAGPVRRLLAAAGRRTRGGVRRGRVAVRAPVVAAADADFVPPLTIVGHRFP

SEQ ID NO: 53449 - protein, 692 aa, Oryza sativa; identical to SEQ ID NO: 52945

SEQ ID NO: 53450 - protein, 89 aa, Oryza sativa
MDITRCMHTTPKHTNICINQESCHDVISLSFLFQDYLVNDSGVAVKIVWFLPLWFYHFSCWDCNFTPLLELEQLNISPPCSGTSCSSRN

SEQ ID NO: 53451 - protein, 433 aa, Oryza sativa
MAGKQGDGREEDGAKVGLPALDISLAFPQATPASIFPPSASDYYQIDDLLTTEEQSIRKNVRAIMEKEIAPIMATYWEKAEFPFHAIPKLSSLGVAGGTIKGYGCPGLSITASAITMAEIARVDASCSTFILVHSSLAMVTIALCGSEVQKQKYLPSLAQLTAVGCWALTEPNHGSDASSLITTATKVPGGWHIDGQKRWIGNSTFADVLVVLARNANTKQLNGFIVRKGAPGLKATKIENKIGLRMVQNGDIVFNKVFVPEEDRLPGVNSFQDISKVLAISRVMVAWQPIGISMGVFDVCHRYLKERKQFGVPLVAFQLNQEKLVRMLGNIQAMLLVGWRLCKLYESGKMTPGHASLGKGWTSRMAREVVSLGRELLGGNGILADFLVAKAFCDLEPIYSYEGTYDINSLVTGREITGIASFKPAALAKARL

SEQ ID NO: 53452 - protein, 791 aa, Oryza sativa
MAHLGAVLCIRVALVVVLLPSLLATVAVAHNDTGEHKNYLIIVRKPYEYDHNVYKTVSSWHASLLASVCDTAKEELATDPGAETRLIYSYRNVVNGFCARVTREEVYEMAKKDWFVKAIPEKTYKLMTTYTPKMVGLTGAPAAYHGGLWNRSNMGEGMIIGVLDDGIAAGHPSFDAAGMGPPPARWKGRCDFNSSVCNNKLIGARSFFESAKWKWRGVDDPVLPVYELAHGTHTSSTAGGNFVPGANVMGNGFGTAAGMAPRAHLALYQVCSEDRGCDRDDILAAMDDAVDEGVDVLSISLGDDEAGDFAGDPVALGAYTAIMRGVFVSSSAGNNGPNPLTVSNEAPWLLTVAASTTGRKFVATVKLGTGVEFDGEALYQPPNFPSTQWPLIADTRGDGTCSDEHLMKEHVAGKLVVCNQGGNLTGLRKGSYLHDAGAAGMVLIGPEFMGSMVQPKSHILPVAQIVYLSGEELKAYMKSTKSPTAALIYKGTVFGDRKTPEVAPFSSRGPSRQNQGILKPDITGPGVNIIAGVPVTSGLATPPNPLAAKFDIMSGTSMAAPHLSGIAALIKKAHPKWSPAAIKSAMMTTADTLDRRRRPITDQKGNNANMFGLGAGFINPTKAMNPGLVYDLTAQDYVPFLCGLGYSDHEVSSIIHPAPSVSCKQLPAVEQKDLNYPSITVFLDREPYVVSVSRAVTNVGPRGKAVYAAKVDMPATVLVTVTPDTLRFKKVNQVRKFTVTFRGANGGPMKGGVAEGQLRWVSPDHVVRSPIVVSAQKFLNGNTSSSDHAGH

SEQ ID NO: 53453 - protein, 585 aa, Oryza sativa
MGSSLEAEQQSLIVRTTEPEDVDDYTGDGSVGFSGQPILKHETGNWRACSLILGTEVCERLAYYGISKSLVTYLSTRLHEGNVSAARNFTTWQGTCYLTPLIGATLADSYWGKYKTIAVFSTIYFLGMAALTFSALVPSLQPPQCFGSFCPQPTVPQYLIYFVGLYMIALGSGGIKPCVSSFGADQFDDTDPVERTKKGAFFNWFYFAINIGSLISGTVLIWVQQNCGYGIGFGIPTIFIALAIGSFFIGSQRYRYQIPGGSPLIRVCQVVIAAIHKRNVDLPVDSSVLYELHGKTSAIEGSRKLEHSSEFSFLDKAAVILSNERGGSHDPWRLCTITQVEELKILMRMFPIWATGIVFFTVCAQNSSMFIEQGMALNNQIESFKIPPATLSSLDVISIVVWVPIYETFVVPIASRLTGKERGFSELQRMGIGLFVATTAVATAALVEIKRLEIARSEDLIHSKVPVPMSILWQAPQYLLVGIGEVFTAIGQAEFFYNQSPDSMRSLCSAFALVTVSLGSYLSSFILTLVSYFTTRDDNPGWIPDNLNEGHLDRFFWLIAGLSFLNLLLFVYYAQQYKCKKAAAI

SEQ ID NO: 53454 - protein, 149 aa, Oryza sativa
MRGGIPICFPQFGNSGTLEQHGFARNRIWALDEEHPPLNQNDNNSKASVDLILKPSEDDLKCWPHGFEFRLRVSLTKDGNLSLVSRIRNVNGKPFSFSFGYHTYLSVSDISEVRIEGLETLDYLDNLSQRERFTEQGDAITFESEVKNV

SEQ ID NO: 53455 - protein, 134 aa, Oryza sativa
MLPLLSSNTIYTYLSLELINHVSNQANILPEAAKKKKDQTKLSKNRPRHEPPENLASDITRPNFFGPESSEPPTTHPTAKTPIPSVFGAAITSNQGCNAPNCRTPVENAGKLGCGSATPSRHDHNMLDGMPTRF

SEQ ID NO: 53456 - protein, 880 aa, Oryza sativa
MLQRAASNAYSWWWASHIRTKQSKWLDSHLQDMEHRVKCMLLLLGEEADSFSKRAEMYYKRRPEVITQVEEVYRAYRGLADRYDIISGELHKANHTIATAFPDQVQYAMLEEEDDNIPKAFTPVDPRKIHKSTVDGLMKKKKGGEQPAGSMNKNTTSAPIDKDNAREEISRLQKEILVMQTEKEFIKSSYESGIAKYWDLEKQINDMQEQVCHFQDKFDESAVIEDDEARALMTATALKSCEDTIVKLQEQRKTSASQAMGESERVKVLREKLKAVMEGHGKSLPDSPDPCDKNVRKNHGFEMEEVQHIKLGEFETQTVLEKIKEHFERDGSISVAEITEHIDELVNKVVDLELMVSSQSSQIDRLCRENSELESCLQSLEEENVSDPDKVNEKLKKLEEELVRVQALESCFHKDESTIRSNFSEAISRLSGISEMLQSSEHGGVGGTLAVADGKEEEEDNDAGGIDDVAEPQVQTEAASDDVDPAGKSTADVDPAGKSTATQEEAQAVDVGQEKAGGCSRERGSLVRLRHISSDDLGGCDDEAPAAVDDPDGMRKQKKGQEGEGVEEEKKVILVAEYRALLEENKDAKRRLAEVEKTNQECMHEIRSLRELLSSGSSEAGAAAAGGGGGGGDSSGGRRGHRRTPSYSLGHHRKQSLSSISRMIRMGSTIHEGDESEKVKAEELRLPAVATSSSPLENKLRKDIDTLLEENLEFWMKFSSSLQRVQEFQRKHDELMQQLQPAATDGNSDTKQKQKQEQQLRALKTELQVWSEQNASCEGSCSAGSRPCATCRRRSRRHWNKEEEEESSRRTRRPSSRARCSTCSRRTTGFPTSCRPARTTSRASRPRSRRSCSTGASPCLTPTDLQPEPEPEPQPRRRCH

SEQ ID NO: 53457 - protein, 586 aa, Oryza sativa
MVVADNGKWALEKARALQDLEEEFNQQIARILSCYQLPDHIRLDLHEQHRNDYKVPDDLRLKFVNAVFEGKSGMLDQDEELRVQARKESEKFWVEAAGAAKKAQALQDMEERNRQLFFKHYPGVQDMPDHIREYCFRKFMEDARDEVEVRFGIRNHEMRLRIRAWEESQQFLIKTMADGRAAKKVQTLQDEEKRYVQGVKKTFDSENISEYFQQAFLQQGLLDNIRLLFIDDIEEKFNMPDDEEEPKGYISEDYNRLKAQALQDLEYKFNQQTARILKRYDLPEHIRLDLQEQHYNNYKVPDNLRIKFINAVFNGNPRILDHKRELKVQARKEAEKFWIEAAATAKKAQALQDLEERYKQQFIKPSYDREDISEHMQEYFLRERKITDKAYLEYKNNVEDKFAIRNHEMQLKFLAWEKTQQFRIKMMADERAAKKVKALQDMEERYVQDYINKVERLDVPDYIKQGVIQEYKVPDGTRLRYINYIEEKFRMLDDQEERKVHIWENFKKLKIPLTIKSPITVAIMFSIGIMILFSGFLVPKMPKSLKIMCWATSIVICFAAVLSYDNESSKTTAPTEMHDLENPPSI

SEQ ID NO: 53458 - protein, 325 aa, Oryza sativa
MNAPVSEKYHWDHLEKNENRQFTYEELEKFTNNFQRLIGQGGFGCVYHGCLEDHTEVAVKIHSENSRHGFSEFLAEVQSLSKVHHKNLVSLVGYCSEKAHLALVYEYMSGGTLFDHLRDKTGVGESLNWASRVRILLEAAQGLDYLHTGCNRPIIHRDVKTSNILLGQNLQAKIADFGLSKVYVSDTQTHMSATAAGSMGYIDPEYYLTGRITESSDIYSFGVVLLEVVTGERPIIQGQGHIIQRIKMKVVAGDISSIADARLRGDYDVNSIWKVVEIAMLCTEPVAAQRPTMASVVAELKDSLVPDPPPHHAVAMSPTFGPSAR

SEQ ID NO: 53459 - protein, 382 aa, Oryza sativa
MRMKEAGFLSNQGTLTSVLRACTGLVTLEVGRQVHAHVLKYDKDLILHNALLDMYCKCGSLQDADALFGRMPQRDVISWSTMISGLAQNGRSIEALKVFDMMKSEGPRPNHITMVGVLFACSHAGLVEDGWYYFSSMEKLFGIQPEREHCNCMVDLLGRAGKLDDAVKFIHEMNFQPDSVIWRTLLGACRMHKNADLAAYAAKEILRLEPDDQGARILLSNTYADLRQWADAEKSWKMMRDRGVKKDPGRSWIELGKQVHVFIAGDLSHPCSESIIQELSRLFSRVTNLGYTPQTEFVLQDLATEQKEDLLKYHSEKLAIAFGTMNAMEGKPIRIMKNLRICGDCHAFAKLVSKSEGKVIIIRDPVRFHHFQDGVCSCNDYW

SEQ ID NO: 53460 - protein, 825 aa, Oryza sativa
MSMSKIKHAAKSLKTFQGIHFDECLDDGGIAEELNKWLIEVSWEVANKVGGIYTVIRSKVPITKKEYGNNYICLGPYNDSFVKTEVEVGESKIEAVRETVNEMRRFGIHVVTGNWLIEGFPEVVLFNIGSAAHRLDGWKGDFFEHARIGIPYYDRESNDALLFGFCVFWFLGTFINQVKRRQKSYVIAHFHEWLTGVGLIMTRLRGYDCALIFTTHATLLGRYLCAGSADFYNHLPYFNLDKEAGDRQIYHRYCIERAAACCAHVFTTVSNITGIESEHLLHKRADVVTPNGLNVQKFAALHEFQNLHAQNKEKLNNFIRGHFYGHYDFDLDKTLYFFIAGRYEYTNKGADMFIEALARLNHMLKSSGSDMTVVAFMIFPTATNNFNVESLRGQSISKMLRDTVQNIQSEIGKRLYEICLKGRLPNADQILQPSDTIELKKCIYASQRSTLPPICTHNVNNDSTDPILNALRRCRLFNDRYDRVKVIFHPEFLRSTSPLLPLDYEEFVRGCHLGVFPSYYEPWGYTPAECTVMGVPNISTNLSGFGGFMEEHVHEPQSYGIYVVDRRFKSGDESCQQLAQYMFDFTRLTRRQRIILRNRTERLSELLDWNTLGIYYYRARQIALTRIHPEYEDELLRFATTSSTPSTPGVSRSSTPAPPEHEEEESDEEAPEQQPIDAKPIFPRAASASHLPLDKQFRASAIAAANAADAAAAKEPNLPDALDDEVRQITLGKENQAQSTSNTKPVDFGLPEHGAFSDAHDGQREDAFGDRKASISTQDDFATPDVLKQTPSAGNTASFEPSSTPHEGPILTSFKDQSNTSSTNN

SEQ ID NO: 53461 - protein, 98 aa, Oryza sativa
MRLAEEAGLASPLDELLPPVDFCCAYGSTLLHARSGAASMINYILGIPDPLQWHSENLERNPAHYSGWMARLGPGAVRTTLDGWLASAPTLYAFIPHL

SEQ ID NO: 53462 - protein, 257 aa, Oryza sativa
MGASPSRPLEQSPSSSEGENHRVKYASYTTQGFRPHMEDALAVELDLDATTSFFGVYDGHGGAEVAMYCAKRFHTMLLEDVDYINNLPNAITSVCFRLDDDLQRSNEWRESLNPCANRNCLTNICANLHHFTEDYVPPSYEGSTACVVIIRGNQIIVGNVGDSRCVLSKNGQAISLSFDHKPHHEAERERIQRAGGHVFLQRILGMLATSRAIGDFAYKQNRNMPPSQQMVTCVPDIRVENITDDTEFLVIASDGVW

SEQ ID NO: 53463 - protein, 100 aa, Oryza sativa
MAVREDVLKRARGSAPVSLFCVRLRNWRDELFAKNSGIPSERPFPPRSTYVRDEPLPNNHGMLPTKVLVARFRIFSSRSVPNPLGMLPCSLLFDRSMSWI

SEQ ID NO: 53464 - protein, 504 aa, Oryza sativa
MLRAAATAALRRLPQSQAPRRQARGLQYASPERRPLDGARWALYARLSAHLPSGGMVEELGRWLRERRPLSEEQVLFCVRRFRKFKQNKHALQLMDWMEARGVNLELKHHALRLDLVSKLNGIHAAEEYFGSLPDIFRSKQTYSTLLNCYAEHRMAEKGLELYENMKAMNIVSDILVYNNLMCLYLKTDQPEKIPTTVVKMQESGIQPNKFSYFVLTESYIMMNDIESAEKVLKELQEVNSVPWSLYATLANGYNKLQQFDKAEFTLKKAEEVLDKHDVFSWHCLLSHYANSGNLSEVKRIWESLKSAFKKCTNRSYLVMLKALKKLDDFDTLQQIFQEWESSHEHYDMKIPNIIIQAYLDKGMVDKAEAMRQTTMAQDHSNYRTFCIFAEFYLEKSKMNEALQVWKDAKKMVKGQDWVPEKLVNRYLKHFEDSKDVDGMETFCECLKNLGRLDAEAYEALIRTYISVGRTNPSIPQRMEVDRVDIRPEMFESLKAISTEGVES

SEQ ID NO: 53465 - protein, 776 aa, Oryza sativa
MEVLNTNDHGTARTRDGEETASVPVENPDSSHEMEKKLTHNLTENGQAPTGHTVPSLPDTVSKLKPAQESDDSLKDKTDLPTSTSKTEVNNISENGSTNQSTMLSDESRTKEDKMNHHENIAATTNKKAETDARPESPYRGLIDTAAPFESVREAVTKFGGIVDWKAYRSQTLERRRVMQLELEKAQQEIPQFKQDSEACEMAKLQVVEELGRTRRLVEELKHKLERAEIDVDQAKQDSELAQLRAQEMEQGIDDEASVIAQTQLAVAKERHQKAVDELKLVKEEMRSTHEKHTVLASERDIAAKRAEQAISAAKETEKRVEELTLELIAIKESLESAHAAHHEAEEHKLGAALAKEQDCLAWEKELQQAQEELQQLNMQLVSKTDAKSKIDENTHMLQILSKELAAYTENKMSEEAGVIEEDGSDEAKEISRSIKRALASTRKELEGVRGNIEKAKDETNLIRAIAESIKSEVDKEKASLVTLQQREGMASIAVSSLEAELNRTKEEIEMVYIKEAETREKMAELPKMLQQAAQEAEDAKVAPHSAQEELRKAKEEAEQTKAAAATAEIRLRAVLKEIEASKASEKLALVAAQALQESEETSSVEDSPRTITLPISEYHSLSKRVYEAEELANERVAAALAQIELAKESETRTLERLQQETKEMHKKKDALQIALQRADRAKEGKLGAEQELRKWRAELEQRRKAAKHVANPWTAPPIRSPEQKGSYKEDDAVLTEPNSPMSNSSTDDFVVDQKLRKKKTFFPQMSSILSRKAQT

SEQ ID NO: 53466 - protein, 394 aa, Oryza sativa
MMMMPLRCLSELARRRPDRAVDAMRVGLRCLMSTCPLSKATDDSQRLYATSSCANVPEVALSEAPLSDMLVDSFGRFHNYLRISLTERCNLRCQYCMPAQGVQLTPNSELLSHDEIIRVAGLFVTSGVDKIRLTGGEPTIRKDIEDICLHLSGLKGLKTLAMTTNGLVLSKKLPRLKECGLNALNISLDTLVPAKFEFMTRRKGHSRVMESIDASIQLGFQSVKVNCVVMRGMNDDEICDFVEMTRDKPVNVRFIEFMPFDGNVWNVKKLVPYAEMMDKVRQRFKGVERLQDHPSETAKNFKIDGHAGTISFITSMTEHFCAGCNRLRLLADGNLKVCLFGPSEVSLREPIRAGVDDAGLREIISAAVKRKKAKHAGMFDIAKTANRPMIHIGG

SEQ ID NO: 53467 - protein, 79 aa, Oryza sativa
MTDRNGPFGRLPEHLLVEIFIRLPTCEWVQISCVSKHWASIFQGECMWQTAIARNWPSAGLRKRWPGPIPRGSARRLVL

SEQ ID NO: 53468 - protein, 286 aa, Oryza sativa
MLTCGRFLSSSAAASTPSLSPFRNLTLSLLRRPHLRLLSSSATASAAAAAVEPDTKGGAGGGAAKPQWKAAIDFKWIRENTDAVAANIRDRNSAANLDLVLQLYDEYLALQKEVERLRAERNAVANKMKGKLEPSVRQALVEEGKNLKEGLIALEEDLVQLTDKLQLEAQSIPNTTHPDAPVGGEESSVVRKEVGSQRNFNFTIRDHLQLGKELDLFDFDAAAEVSGSKFYYLKNEAVLLEMALVNWAITEVSKKGFTPLITPEIVRSSVVEKCGFQPRAQNTQVY

SEQ ID NO: 53469 - protein, 91 aa, Oryza sativa
MIFFKKKYLIWSMAFYHCSFISLKKLFALNKLVFFFFTRTYPSPVRPPENSPRLFHVPSPPGASFSPARSRGRVVDHSPPDSCEQLPIALP

SEQ ID NO: 53470 - protein, 326 aa, Oryza sativa
MNIYIKTMREDDDKEVVAQACTSLADIVRDCGFAIIEPYITRLADATLILLRQESCCQQVESDGEDDGDIDHDEVLMDAVSDLLPAFAKVMGSYFDPIFTKLFDSLMKFAKSPHPPQDKTMVVATLAEVAQGMGAPISAYVDKIMPLVLKELASSEATNRRNAAFCVGEMCKNGGAAALKYYGDILHGLHRLFADSEPDDAVRDNAAGAIARMIMVQPQSIPLNQVLPVFIKALPLKEDHEESMVVYSCVCNLLLSSHPQILPLVPDVINAFAQVVVSPNESDEVKTVVAKAVSHLISVYGQQMQPILSALPPAHANALASFANRR

SEQ ID NO: 53471 - protein, 1068 aa, Oryza sativa
MAGKKRPPTALSEPEAAAAAEEEEAAAKTAPAAEAPAKKKKLAMERKKQRKEIDKERHRQSAESDAAAAKPKQPAEVAPEAAAAAAAAPVAPPPVIPVVSGPGLHMNVFRDLASPEASQREAAAEALVAELRQVQVAHEKGGRKEGESEAEGGDGSSRMEAEKDDGLENCAPSVRYAIRRLIRGISSSREFARQGFALGLAVVLESIHAISVEAIMKLIPNLLEYSASMRGPEAKDNLLGRLFGYGSIVRSGRVSGQWAHEEGSPIVKDFVDEVIKLGSKKRYLTEPAVAVILDLAGKLPEEAIISEILEAPSVQDWFNRAADAGDPDALYLALKLQEKTNAQEIFGKLLPYPFSPEGFFAEEHLLSIAACFKESTFCLPRIHSLWLVITDMLVREAASQSDIATSSSKKHKKNKKGSSSEDTKKNLHTFCEVIIEGTLLLSSHDRKHLAFNILLNLLPRLSPSSIQVILSSKVVHGLMDVLSNESSWLHNAGQHFLKELVSLVSDDNDRRVAVITNLQKYTGGRFDCMTKTRTVKDLVAKFRSGQDCLCLVQSLMSLFVDESSVTDEPSDQSQTTDENSEVGSMEDKDLFGQGSADLLKSWIVTTIPCVLKNLKLTSKGNSLTDSEMVKCIEEKFLVQTEVLKFLAVQGLFSASLGYEVTSFELHEKFKWPKPAISTSIRNECIEQLQFLIEDAQKDEALHVSEVKSNDLGFYFMRFINTLCNIPSVSLFRTLSSNDDNAFKKLLDVESLLFYEERKVGPGLDSTKMHAMRYLLIQLLLQVLLHPDEYWEAAIDVTICCKKSFPSIVQNDKSSGQPSNEGAEVFNEDGPGKSNKDGPEEHNDDASEDSNEDGPLEFMDVLVQTFLSVLPHVSGPVCFSIEQVFRVVCDEITETGLLDMLRVVKIDLKGSRRQSGSDDDEDDACVDIEDDDETIVEDAEVGDTDSTADGLDEEMDDDSADEVDEGQDDLEESVAHESKDGDGAEVTKDGDDSDDSDGMDDDAMFRIDPYIARIFKERNLPGSETKQSQLMRFKLRVLTLLEIYLQRNTGNNLVLEVYSFLMQAFVKSA

SEQ ID NO: 53472 - protein, 376 aa, Oryza sativa
MVGQTVMRIVRPCFKPDHQLAVGGTRDGLLWYKDTGRHACGDFSMALVQANNLLEDASQVEAAPLLLSHSSSTTFVGIYDGHGGPETAHFIAQHFFPNLKKFATEQQTVSVDVIRKSYAATEEGFLNLVRKQWLIKPQLASVGSCCLVGIINEGVLYVANTGDSRAVLGRLERGVIKAVQLSAEHNASIESVREELRQFHPDDPRIVVLKHNVWRVKGLIQVSRTLGDAYLKSTEFNREPLLARFRLSEPFHKPILSPEPSIEVHKLCTEDQFVIFASDGLWEHLTNQEAVDIVNCAPRNGIARRLIKAALREAAKKREMRYSDLKKIDRGVRRHFHDDITVVVLFLDSALVGKRFYGGPLLSLRGGDGASTLTQK

SEQ ID NO: 53473 - protein, 661 aa, Oryza sativa
MATTLTPTQRYAAGALLALALRQAQIHQSVLLGAHHHHDDDDEEQGRTSTSSGGGGGSSSSSSNSGAGADADLWTHDSHGLLRPVFRFLEIDPKAWSGLEETAASSEAKHHIGAFLRIIFEEDGESSSDRSVQELALAKGVDVMVMSLGNDSEVGNTIKGGDQDALPSSSGTDKSPGESSHDDQLGINKLTLDDIPANNHRKMALLFALLSACVADKPVSQEEEDRKSTRFRKGYDARHRVALRLLSTWLDVKWIKMEAIEVMVACSAMAAAKEQEQSQESASPKSKWEKWKRGGIIGAAALTGGALLAITGGLAAPAIAAGFGALAPTLGTLVPVIGASGFAAMATAAGSVAGSVAVAASFGAAGAGLTGSKMARRIGSVKEFEFKPIGENHNQGRLAVGILISGFAFDEDDFCRPWEGWQDNLERYILQWESKHIIAVSTAIQDWLTSRLAMELMKQGAMRTVLSGLLAAFAWPATLLAATDFIDSKWSVAIDRSDKAGKMLAEVLLKGLQGNRPVTLIGFSLGARVIFKCLQELALSSDNEGLVERVVLLGAPVSVKGERWEAARKMVAGRFVNVYSTDDWILGVTFRASLLTQGLAGIQAIDVPGVENVDVTELVDGHSSYLSAAQQILEHLELNTYYPVFVPLSAANEETDGTVAQ

SEQ ID NO: 53474 - protein, 563 aa, Oryza sativa
MCKKAARAGLAQSLFERLVILGVKPFRLQVQYRMHPCLSDFPSNCFYEGTLQNGVTVNERQTPGIDFPWPVPNRPMFFYVQMGQEEISASGTSYLNRTEAANVERIVTTFLRSGVVPSQIGVITPYEGQRAYIVNYMSRNGSLRQQLYKEIEVASVDSFQGREKDYIILSCVRSNEHQGIGFLNDPRRLNVALTRARYGIVILGNPKVLSKQPLWNSLLTHYKEHECLVEGPLNNLKQSMVQFQKPKKIYNDRRLFLGGGQGVMQGASFGAAGTNPVADKRSGRGKGHSFVPFGPPNGAHKPGVHPSGYPLPRMPFPPFAGAHSQPYAIPTRGSLHGPIGAVPPVPQPGNRNFGPRGNTGGPIGGHLAHQQSSQQAMGGMGSAFNFPGLENPSSQPSGGGPMSQTGLMTQMPVQGLSQTFRDGFSIGGMSQDFFGDDFKSQGSHVAYNIADFSTQASQGGYGVDYSQGPQSGYPGNYLNQNAHPGYSHMGAANDIVSQDHMAHGSHGMFTQAGYNDSSQDESSQMHFGMAGPGLQSQPMMNPLYSQSYAHYNTQPQSLQPPPQ

SEQ ID NO: 53475 - protein, 283 aa, Oryza sativa
MPQSLVALDVTYNPLLRGRLPSSSADRKMRINYIGTSIGAGSSVGSENLRLLNCVDMKGCNTTGLTNPVSFAVNCGGKQYTPPSDPSNMFNDDSANLGAADFHVDTNNNWVVSHVGTDPFSNSSGIVTTGNGTNIPELYRTARTSTGSLWYYVVGLPSGKYTVQLFFAEIVIESGSGRRLFNIDIQDRNIMTDFDISKEAGGSNRPINRNYTADVTTSVLKIHLYWNGRGTCCIPRNGTYGPLVSAIRVFPSAETQASPPPWRLHQGTMKSEEEWLQELLLFP

SEQ ID NO: 53476 - protein, 318 aa, Oryza sativa
MMVPSSRKVRVFCSDPDATDSSDEDDQNKKERRFSREILIPMENSKASKPVKTLVQCGTKTVKDSEKEPTSKYRGVRRRAWGKWAAEIRDPVRKSRKWIGTFNSEEEAAAAYLAQSNQFHEELMALKIQSSVSEQEDLSSSVTISCVSSSQSCDQKIQAKPQEHKRVSVVVNRETVEQKFKAQPQAQKIKAQPEVQKRVSVKISHETEDEHLLNLPSTPKGKEISMGAVLGRIDEIPVSNCVGHIDEFPPDDFTRLADAFPVSDFIGMADVPLGDDYIGLADISHLPLPITDLKFDLNAELNWDGFDFASLEQELNCL

SEQ ID NO: 53477 - protein, 419 aa, Oryza sativa
MFGTQVRGVVEDDFNPRRRRTLWNTPAASMPTTTHTIRYSTPRKGHANAHQLLAKFEDLYGFMVEGNVDDVNVLNDVRERMREQGRVWWALEASKGANWYLQPRISSNGGSEGVISVTSLKLSVLTNTITLRRLIRKGVPPVLRPKVWLSVSGAAKKRSTVPETYYDELIRATEGKTTPATLQIDHDLPRTFPCHSWLNSEEGQASLRRVLVGYSFRDSEVGYCQGLNYVVALLLLVMKTEEDAFWMLAVLLENVLVNDCYTDNLSGCHVEQRVFKDLLAKKCPRIAAHLEAMGFDVSLVATEWFLCLFSKTLPSETTLRVWDVLFNEGAKVLFHVALAIFKMREDDLLRIQHIGDVIDILQTTAHHLYDPDELLTFAFDKIGSMTTNTITKERKKQETVVMAELDQRIRRLSSLKMDG

SEQ ID NO: 53478 - protein, 638 aa, Oryza sativa
MMDGSTAAAAELEAAERVVMRWDSTASASYGGGGGDEQMLFDGGGDRVEAERFLRAVDDLRRLAPPSPATVGSPRRTSSASGGGGAASNAVQVAMARLEDEFRHVLSSRALDLEIEALADLTSLSMCSERTNSADVAEEAAAADEDDSVSSSVGRRSSYRSLRSIREIDLLPADAISDLHAIASRIAVAGYGRECVQVYASVRKPAVDSALRRLGVEKLSIGDVQRLEWEVLEAKIRRWIRAARAAVRGVFASERRLCFLIFHDLPLSSSTITTATHDAPFAEAVKGAALQLFGFAEAISIGRRSPEKLFKIIDLHDAIADLLPDVSDIFAASKAGESIYVQAAEIRSRLADAVRGILSEFENTVLRDPSKTPVPGGTIHPLTRYVMNYSSLISDYKTTLSELIVSRPLACSRIAPEGNENAPSFPDLDLADPDSQLPLAAHLIWIIVVLEHNLESKASLYKDAALSHLFVMNNVHYIAHKIKDSPELRGLIGDEYLKQLTGKFRLAATRYQRTAWLKILNCLRDEGLHVSGGFSSGVSKSALRERFKSFNAAFEEAHRVQSAWYVPDTQLREELRISIAEKLLPAYRSFLGRFRHHIENGRHPELYIKYSVEDLETSVTNFFEGCPPSLHNRRRSHG

SEQ ID NO: 53479 - protein, 322 aa, Oryza sativa
MTFSMDLNASPLPEEDEQPYEQQVEVDFAQEEHVESAVATMRREREERRKKLKREQQDEGSRLHSQQIRNDYAPYNRAGRGRIKEAPDGWMNCPAFGEPIDKIIPSKVPLDETFNDLVPPGKRYSSKQVVNKQRKAGREIGLVIDLTNTTRYYSPAEWTRQGIKHVKIPCKGRDAVPDNESVNWFVYEVMMFLDRQKQSKNPKYILVHCTHGHNRTGFMIIHYLMRTQVSCVAEAINIFAKRRPPGIYKRDYIEALYSFYHEVPEHMITCPSTPEWKRSSDLDLNGEAKQDDDDENGDLAPVHVSIFRYSNLKLLPSNLVEN

SEQ ID NO: 53480 - protein, 854 aa, Oryza sativa
MESSAGGGGGESPPPAKPVLLHGDLDLWVVEARLLPNMDMFSEHVRRCFAACKPPTSCATARQPRHARGHHRRKIITSDPYVTLSVAGAVVARTRVIPNDQDPVWDERFAVPLAHYAAALEFHVKDNDTFGAQLIGTVTIPADRVASCQEVEDWFPIIGNNGRPYKPDTALRLRLRFNPAADNPLYRRGIPGDPDHQGIKDSYFPLRHGGRVTLYQDAHYREGDLPEIELDEGGKVFDHNACWEDICHAILEAHHMIYIVGWSVYDKVRLVREPSPSRPLPEGGDLNLGELLKFKSQEGVRVCLLVWDDKTSHDKLFIKTGGVMATHDEETRKFFKHSSVICVLSPRYASSKLSIFKQQVVGTLFTHHQKCVLVDTQAWGNKRKITAFIGGLDLCDGRYDTPEHRLFKDLDTVFDNDYHNPTFPSGAKGGPRQPWHDLHCRIDGPAAYDVLKNFEQRWRKATKWRERFRKVSHWKDDALIKLERISWILSPSPTIPNDDISLRVSKEEDPENWHVQVFRSIDSGSLKGFPSDCKEASKQNLICRKDLIIDKSIHTAYVRAIRSAQHFIYIENQYFLGSSYAWPSYVNSGADNLVPIELALKIASKIRAGERFAVYVVIPMWPEGVPTAASVQEILFFQTMEMMYRIIAQELKAMNIKNAHPQDYLNFYCLGNREESSSSNGSPESNDKSAAALARKYRRFMIYVHAKGMIVDDEYVILGSANINQRSLAGSRDTEIAMGAYQPHHTWSTKGGHPRGQVYGYRTSLWAEHLGMVDDLFKDPSSLECVNYVNEIAEENWRRFTAEQLITLQGHLLKYPVKVEADGKVGPLPEHECFPDVGGKILGAPTSLPDTLTM

SEQ ID NO: 53481 - protein, 108 aa, Oryza sativa
MENQQLTTTLNMVTQSCAFAESQNSVLRTQMMELDSRLSALREIIFYMNNGNQSPSNPTIAATTYPSTTTMTAATTGHYDYYDVFTANAWGSGMQMMQQPIDQFLYQC

SEQ ID NO: 53482 - protein, 69 aa, Oryza sativa
MDGETLSWAEPECGDEFALFFLDKAACTTVSGAISTVTASRTGSPGCAWRGRRVPPPEVTSPAGLLRSA

SEQ ID NO: 53483 - protein, 701 aa, Oryza sativa
MLEPTAMEVPITSSVNTAVVPVPVVHNPRARKLRSAVWQDFTKERRADGSCVAVCNHCKKQLTATSRSGTTHLRNHLAICTTTSTRRAGKRRKLIVRRILHNKTSTDGQSGDGHASGEDHDNDGTHFDQELSRRDLAHMIVQHGYRFSIVDDVGFQKFVKNLQPRFRMVSYETVRADSMTIYESEKLKLQDALLKIPCRLSISVDMWRSNTQMDFLCLTCHYIDHANDEWKVRKKILNFVHVEAPFTDDQIASLILEKLREWGIDRKLAAIVLDNCASGEIVARELLVVLQPRRLLLLNGNLFQVRSCAHILNLTVQESLEQTSDIITRVREMIQNVKFSQERFEKFQDTAKLLQMDQKLLVLDSPNNWPSTYLMFDSACYYHDVLMRLAEQEAHYGAFLTAKEWADVKALTEILDALYHKMEKFPVENPTANLYFNDMCEVHVLLNTWRNSPSPVVAQVADRMLTKFEGYWDLTRPVMAFASILDPRYKMKSVEYFCRLIYAADQFRAKTTIDDIRQSFTNLCSEYEQSGNSFKNPSALFYSATSNSCMSSVYSNGDDFKTFSRITLSDARRGLDQYIQETSSGQSFKSDLDMYLEEPVYRQKEGHLDNFDILGWWKSFAAKYPVLSQMARDILAVPVSIIPLDSDARTLNEYLSTMDPSTVQGLVCAQDWLREDTEVASSDGHADDKAARGDELIVLPK

SEQ ID NO: 53484 - protein, 76 aa, Oryza sativa
MKRWRISSLHAYLCPLSTNLWWLPLPSPTATTTLLLISPTSSASLLSPIQSDDPTPRPRLLYGYNVLCRTTTFVQR

SEQ ID NO: 53485 - protein, 516 aa, Oryza sativa
MKAAAATGGGGKETLAATLLRYLIILIVPFTVLYILYTLHAILSSTPSCPLDRPIVTSSVSLSQLSTTRNHTPSSSSLSTPPPAPVSMAATTLQHVVFGIAASARLWEKRKDYIKIWWRPNAGMRGFVWMDQPVRESGVPDGLPPIKISSNTSGFPYKNRRGHRSAIRISRIVSETFRLGLSGVRWYVMGDDDTVFLPDNLVAVLQKLDHRQPYYIGYPSESHLQNIFFSYGMAFGGGGFAISQPLAARLERMQDACIHRYPSLYGSDDRIHACMAELGVPLTRHPGFHQYDVYGDLLGLLAAHPVAPLVSLHHLDVVRPLFPNARSRPAALRRLFEGPVALDSAGAVQQSICYDARNRWTVSVSWGFVVMASRGMISAREMELPARTFLNWYKRADYKAHAFNTRPLARRPCEKPSFYYLSSARRTVARDGETTVTTYQRWRHRNDMRPPCRWKIADPDALLDTVVVLKKPDPGLWDRSPMRNCCRVLSSPKGQEGNKTMTIDVGVCKDWEFSQV

SEQ ID NO: 53486 - protein, 422 aa, Oryza sativa
MGLGNEASSSSSRLLDPAPLLPHHGGDGAGKLSSQPKTFANVFIAVVGAGVLGLPYTFSRTGWAAGSILLLSVAALTFYCMMLLVACRRRLADEHPKIASFGDLGDAVFRGPGRLAVDTMLVLSQASFCVGYLIFISNTMAHLYPVFAPSSNALLSPKALFIWAMLPFQLGLNSIKTLTLLAPLSIFADVVDLGAMGVVLGEDVSVWLAKPPPVFAFGGLSAILYGIGVSVYAFEGIGMVLPLEAEAANKKKFGTTLGLSMGFIAVMYGLFGAMGYIAFGDATRDIITTNLGTGWLSAAVQLGLCINLFFTMPVMMHPVYEVAKRLLHGKRYCWWLRWLLVLAVGLSAMYVPNFTDFLALVGSSVCVLLGFVLPASFHLKVFGAEMSWSGVLSDVLLVLLGLSLAVFGTYTSLLQIFHSSSA

SEQ ID NO: 53487 - protein, 361 aa, Oryza sativa
MVVPIANLSAVVAGAAHAAKAFAVEMLPAAVTREAVGASMAWLLRHLWAWLVAARGVAVENLPVAAAVAKGAAGSAMEASAPWLQVAAEFLHGLYGWMLAAVAVAVESLPGVAKSTVEASQPWLAAAAELLQVIYGWLVAAIAVAVENLPGVAKNTVEYTVEASQPWLAVAAKLLWGLYGWLVAVSAVAVEMLPDAAKNAAGSAAEASQPWLAMASKLLQAHDLCGRLVTAGDKVVENLPEAAAAAMGGGAHCSADATPMPAHGHGGVAVYALLAIALLAVAFLGGAVCALTCRTMKGPGLGGARVPRAVFRASPRRYYAAVRTARKARRSASGIRWKNLVAAMSLAVAACIVYLGAKMLH

SEQ ID NO: 53488 - protein, 458 aa, Oryza sativa
MAGTEELLVQESTVPIVSDGDPSRPAVRSAHFLLPRAAAGGRPPPLPSSPLCSGGPVPDHHGLLRVVEFKGWAGSPGLWRQWVDRLRPRHEPLWRSVGILDAILATAYRVRRDEGTLLQLAAFWSADTNTFMFPWGEATVTLEDMTVLAGLPLFGKPVRARLPDALVGDVDALMAVRSALHRSKYKKPSYPGWVQYFLKRQEEEDDETAASAGADLIEHGAFLAMWLSLFVFAAPPFDVVGPQVFPIAALLARGIRVALAPAALAGIYGDLSALKRFLDLRDREEEALQVTAPMHILHLWVWERFPQLRPAMATTTIPATTDACRVPMAARWHGVHKALDPQFVHGVFMSPDKFEWRPYGSRSIALPPKEAKAGTWVVQDVMTSNTLLSFTRCLRQCELVGMGCIEQYIRIVLQGSLALIRMCLGRLLALTQTGRWHGEHIRLAIESLHWLFHTISLG

SEQ ID NO: 53489 - protein, 201 aa, Oryza sativa
MAAAAAGGGGAKWSETAMLVIDMQKDFVDPAMRSPMLVDGGQAVVPTVAEAVAVARERGIYVVWVVREHDPSGADVEIFRRRYYSGGKGPTVKGLKGADLADGLVIKEGEYKLVKTRFSAFFATPLDSVLKTSGIKKLVIVGVQTPNCIRQTVFDAVALDYEKVTVIIDATAAARPEIHLSNIRDMKNIGVETPTLEEWRR

SEQ ID NO: 53490 - protein, 398 aa, Oryza sativa; identical to SEQ ID NO: 43178

SEQ ID NO: 53491 - protein, 779 aa, Oryza sativa
MSTWQLASYKDPLFPSCWKKRSKSPNQPAKVCRISSLIKQRSDKRMAETAILLAIKKISIAVAGEMLSLSRPIIAKKSELVVALPTNMELVKDELEIINAFLKKVKTRDCRDNVLETWITQVRRLAYDIEDIVDQFIYVVGEHQGKGFWGNLKKFVKKPESLFSLDRVATEVEKVKLKLKELSSRRDRWVQSTICRPDAEIPNYDDEQGVYQFRHSQVPDYDDNELVGVDEYRETLTKLLYSEHCSLRIVAVCGMGGLGKSCVVYNVFKRERSHFDCSSWISVSQSCKMGDIFRNMLNQLLGDSSEVNYDTSRMGIEVLKEELKRFLEDKSYIIALDDIWRAPVLLEIRDTLFNSGKGSRLIITTRIDEVAAIAEDACKINLEPLSKYDAWILFCRKVFWKTENHACSPELQKWGEKIVNKCEGLPLAIVALGSLLSLRDKTEAVWKCFHSQIIWELQNNPDISHVEWILNLSYRHLPNHLQNCFLYCAMFPEDHLLRRKKLIRLWIAEGFVEQRGSISLEEVAESYLIELVHRSMLQVVERNSFGRIRRFRMHDLVRELAIKMSEKESFSSLHDDTSGVVQVVSDSRRVSLIRCKSEITSNLASSRLHTFLVFDTTMLQCSWSCFVPPKSKYLAVLDLSGLPIEAISNSIGELFNLKYLCLNDTNLKSLPKTITRLHNLGTLSLERTQVTSFPEGFAKLKKLRHVLVWKLLYNEHSSFSNSLGMGTIEGLWNLKELLTLDEIRANKKFVSRLGYLAQLRSLYISDVRSNYCSELCSSL

SEQ ID NO: 53492 - protein, 509 aa, Oryza sativa; identical to SEQ ID NO: 50922

SEQ ID NO: 53493 - protein, 618 aa, Oryza sativa
MGSGLFKPRVHPDLRDVFSKMSFFDKIGFLFIHAFDKRNLWHKVPVPIGLLYLNTRRTLLEKYNLLAVGRSSHGALFDPKEFLYRTEDGKYNDPHNAEAGSQNTFFGRNMEPVDQQDELMSPDPFVVATKLLARREYKDTGKQFNILAAAWIQFMVHDWMDHMEDTGQIGITAPKEVANECPLKSFKFHPTKELPTNSDGIKIGHYNIRTAWWDGSAVYGNNEERAEKLRTYVDGKLVIGDDGLLLHKENGVALSGDIRNSWAGVSILQALFVKEHNAVCDAIKEEHPNLSDEELYRYAKLVTSAVIAKVHTIDWTVELLKTKTMRAAMRANWYGLLGKKIKDTFGHIGGPILGGLVGLKKPNNHGVPYSLTEEFTSVYRMHSLIPSTLKLRDPTGQPDANNSPPCLGDIDIGEMIGLKGEEQLSKIGFEKQALSMGYQACGALELWNYPSFFRNLIPQNLDGTNRSDRIDLAALEVYRDRERSVPRYNEFRRRLFLIPIKSWEDLTSDKDAIETIRAIYGDDVEKLDLLVGLMAEKKIKGFAISETAFNIFILMASRRLEADRFFTSNFNEETYTKKGMQWVKTTEGLRDVINRHYPEITAKWMKSSSAFSVWDADY

SEQ ID NO: 53494 - protein, 447 aa, Oryza sativa; identical to SEQ ID NO: 45709

SEQ ID NO: 53495 - protein, 318 aa, Oryza sativa
MDDGGFGVERLVHEQELDLDHLIRLISLEAAEEGEAVGSVLEAKDEVDEEAAEGVEEPVRLDDELAVLHVLILDMDVVVGGALRDDDDLGVQAGLLAGVVLLHELGVVRARVGARQHGAPEAAHARRLERPCPLAVLDDAGDEHEDGRDEEARGGGARLPVDVEGEGDLGDEAEEVAEPELVVLDGECGDGVLPAEVEDEEGRPEDEEVHVAAAVGAVAAELLVLGEVAEGVDGDGVGEEVGEPEHEMEPGGDVALAEAAGEEEEDLQREAAQQKHPDLPLPPQPPQARHLAASSLVVGGGSCCSALPGVGGGGGGGA

SEQ ID NO: 53496 - protein, 656 aa, Oryza sativa
MSLHIGRLSSHVRQRYLEHLFQRFGNCTVRLKDGYGFAVFDSNDDAARAMRALQGKFVCGERITVNWSKQQPRFSKDFRSSRNIESSHQRAPRVRDGNIRFRDSLAQKNHPASHDQGHSPDVAPEQKSSDGALEKKSDEKKSDGDVEDLKDVRETVGQDPVEMKRNEDVTSDANVIEHDRWEETGKGNPGRDDDDFDRYEPYHGYARQEERAEVVKASSQETYHHRFSSQKSKEYPAGHTAHDCPQKTDGGFEAWRDALSRQERLRRFGSPSRRQPDTRDCSKKTDDRFEAWRDALSRQEKGMVRLKRFGSPSRKRTEEFRVDKVVETHRMVQDGRKQFSDRTSHAHRLSNVSREDKRHTRCSESIPQTPKESRKRSRSKRSRGSSLSSDRSTSHSTSKCSRSRAHSPSHSAHSSSKSFQPTQPEGLRSMAVSNVSPLLVSGSPQHNLPSTAENKNSDFLVNSPLEGNLDSKTTTGLKHTRGYQQDIKDSRLSGESPVIPLRLKIQRNGELPVSGKDAYLDGYTETNLNNNLVYDDNVADGVQVQKTNSEDASSVKSSKDILVKSERSNSLKLTTNEVVSALKHNGMEARGTDLLNQPVEKYFGAARLWPWEVIYYRKLKKGPISTENYAKRLEQNKEYSIVDRYVRSSSGWWECH

SEQ ID NO: 53497 - protein, 250 aa, Oryza sativa
MPVAEGAVTDLFGRPLFFSLYDWFLEHGSVYKLAFGPKAFVVVSDPIVARHILRENAFCYDKGVLAEILKPIMGKGLIPADLDTWKQRRKVITPGFHALFIDAMVGVFTKCSERTIFKLEELIERGEHGEKYTIVDLEAEFSNLALDIIGLGVFNFDFDSVTKESPVIKAVYGTLFEAEHRSTFYIPYWNLPLTRWIVPRQRKFHSDLKVINDCLDSLIKNAKETRQEADVEKLQQRDYSSLKVRFPSCL

SEQ ID NO: 53498 - protein, 475 aa, Oryza sativa
MAGGFRVLHLVRPFLAFLPEVQSADRKIPFREKVIYTVISLFIFLVCSQLPLYGIHSTTGADPFYWMRVILASNRGTVMELGITPIVTSGMVMQLLVGSKIIEVDNSVREDRALLNGAQKLLGILIAIGEAVAYVLSGMYGSVSQLGTGNAILIILQLFFAGIIVICLDELLQKGYGLGSGISLFIATNICENIIWKAFSPTTINSGRGAEFEGAVIALFHLLITRTDKVRALREAFYRQNLPNVTNLLATVLVFLIVIYFQGFRVVLPVRSKNARGQQGSYPIKLFYTSNMPIILHSALITNLYFISQLLYRRYSGNFLVNLLGKWKESEYSGHSVPVGGLAYYVTAPSSLADVLANPFHALFYVVFMLSACALFSKTWIEVSGSSAKDVAKQLKEQQMVMPGHRESNLQKELNRYIPTAAAFGGVCIGALTVLADFMGAIGSGTGILLAVTIIYQYFETFEKERATELGFFGF

SEQ ID NO: 53499 - protein, 500 aa, Oryza sativa; identical to SEQ ID NO: 36105

SEQ ID NO: 53500 - protein, 103 aa, Oryza sativa
MERGGKKDDIEAETVDYCARDPINIILHTQGVPALATSSEGAESCDEDAARCWGVGDERRERSSGDTRGGRVGSECEVMREAGLLLPKLRDRSLWGKAARGKR

SEQ ID NO: 53501 - protein, 270 aa, Oryza sativa
MSGLRAISTLLHTCAAAAAGGSSRRVALAPPLGRSFRVPWRAPSAFVFDEVARAAGGERRRVSTRAASWDSEKSPYETLELDRDADEETIKTAYRRLAKFYHPDVYDGKGTLEEGEAAEARFIKIQAAYELLIDDQRRKSYDREHHVNPMKASQAWMEWVMKKRKAFDQRGDMAVAAWAEQQHREMTLRARRLSRSKIDPEEERKLFAKEKKASMEFYSTTLKRHTLVLRKRDIMRKKAEEDKKKEISRLLALEGLELDTDEDDNINFLK

SEQ ID NO: 53502 - protein, 634 aa, Oryza sativa
MAKEYPASPKAQQLQESKKQRLTYILVVSALCVAFYVLGAWQNTTVPKPAASSAITKVGCDPAAAGQSSAVPSFGSASQESLDFEAHHQLSLDDTGAEAAVQPFPACPLNFSEYTPCEDRKRGRRFERAMLVYRERHCPGKDEEIRCLIPAPPKYRTPFKWPQSRDFAWFNNIPHKELSIEKAVQNWIQVDGQRFRFPGGGTMFPRGADAYIDDIGKLISLTDGKIRTAIDTGCGVASWGAYLLKRNILAMSFAPRDTHEAQVQFALERGVPAIIGVMGKQRLPYPSRSFDMAHCSRCLIPWHEFDGIYLAEVDRILRPGGYWILSGPPINWKTHYKGWERTKEDLKEEQDNIEDVARSLCWNKVVEKGDLSIWQKPKNHLECANIKKKYKTPHICKSDNPDAAWYKQMEACVTPLPEVSNQGEIAGGALERWPQRAFAVPPRVKRGMIPGIDASKFEEDKKLWEKRVAYYKRTLPIADGRYKNVMDMIANLGGFAASLVKYPVWVMNVVPVNSDRDTLGAIYERGFIGTYQDWCEAFSTYPRTYDLLHADNLFSIYQDRCDITNILLEMDRILRPEGTAIIRDTVDVLTKVQAIAKRMRWESRILDHEDGPFNPEKVLVAVKTYWTADESEQH

SEQ ID NO: 53503 - protein, 383 aa, Oryza sativa
MIADAIDKVGPDGVLSIESSSSFETTVDVEEGMEIDRGYISPQFVTNLEKSIVEFENAKVLITDQKITSIKEILPILEKTTQLRAPLFIIAEDITGEALATLVVNKLRGILNVAAIKAPSFGERRKAVLQDIAIVTGAEFLAKDLGLLVENATEEQLGTARKVTIHQTTTTLIADAASKDEIQARVAQLKKELSETDSIYDTEKLAERIAKLSGGVAVIKVGAATETELEDRQLRIEDAKNATFAAIEEGIVPGGGTAYVHLSTTVPAIKETIEDHDERLGADIIQKALVAPASLIAHNAGVEGEVVVEKIKDGEWEVGYNAMNDKYENLIEAGVIDPAKVTRCALQNAASVAGMVLTTQAIVVEKPKPKAPVAEPAEGTLTV

SEQ ID NO: 53504 - protein, 212 aa, Oryza sativa
MGFPVCCYSELLLPKQLLHLLLLLGYIRRFLLWAFHAVGLGDLLDLGDEQQAVLQDHAREHRAPAQALPPQQQHRRAEFRTVPAMVIEEVLPVVRFDELVAAAPAVCGGGDCAVCLSGIGGGDEVRMLSNCRHVFHRCWLDRWMEHDDQRTCPLCRALFIRDEMASALWAAAGVPDASDFDLSYFGAPLTPMPTPTLLRPHELLLTGLGGYQ

SEQ ID NO: 53505 - protein, 379 aa, Oryza sativa; identical to SEQ ID NO: 49208

SEQ ID NO: 53506 - protein, 360 aa, Oryza sativa
MMVIFLTGLVSMILMRTLRNDYAKYAREDDDLESLERDVSEESGWKLVHGDVFRPPRSLVFLSAFVGIGTQLAALILLVIVLAIVGMLYVGRGAIITTFIVCYALTSFISGYVSGGLYSRNGGKNWIKSMILTASLFPFLCFSIGLVLNTIAIFYRSLAAIPFGTMVVIFVLWAFISFPLVLLGTVVGRNWSGAPNNPCRVKTIPRPIPEKKWYLTPSVISLMGGLLPFGSIFIEMYFVFTSFWNYKVYYVYGFMLLVFVILIIVTICVTIVGTYFLLNAENYHWQWTSFFSAASTALYVYLYSIYYYHVKTKMSGFFQTSFYFGYTLMFCLGLGILCGAVGYLGSTLFVRRIYRNIKCD

SEQ ID NO: 53507 - protein, 522 aa, Oryza sativa
MSRLCHHGGRVLLPLLLVAAACLGDPTGDTYDTAMCGAQASITCGGVIVRYPFYLSNATRALPKYANSSTFCGYPGLEIICDGGGGGKAVMMLGNDSYTVSRIDYASLTVSLADADVANGTCPVVSHNVTIPPAPSSLHLADTVGMLIFFFRCAFGPAANAPPKPPSIHPLTCGENSEDAPTQSFLLPASPLPPGDLWHRGCSAVYGVPVLGGSLPSDANDPAWRKDGYIASLRKGFQMSWDRSDRCSRCELTSGKCGYNQNGKFLGCLCANGLVDSDACSKISDSTLRLAGSNLKTKIIAGVVGGGLSAVFALGLIATVFFVRKRKHKKVNSSSKLLKYSGSGGTPRSMGGDMESGSVKDLQTHLFSYEELEEATDSFNENRELGDGGFGTVYKGILRDGRVAGGEAAVQQQLPAGGAVRERGGDPVAAAAPEPGDVLRVHVEPEQGAAPGVRVRGQRHGGRPPARPPRAGARALVAAPPQHRRRVGRRAHVPPRHRATHRAPRRQDHQHPPRRRLPRQGR

SEQ ID NO: 53508 - protein, 250 aa, Oryza sativa
MPKRRRGVRPPPPDPSPAPATIDYNLTYKEIAASGAPGAVDFVKNHGLYLLLLETPSGFSIFSLCGVYIHLPDAIQNIWAMFGTYRSSHDVIWLKEFQKFDDKSSAINVDTGVNKQLTEMIMKWRRPRQKLVVGKPEYKSIIENTLGIPCLCDEVVMDVMWAMKRLIRYFVPTETPELAEEDSLTMSQGLRMFLSRYGFEIKPEMVYNDIVRAASIVFRCDAVEDLYEHLQHLGRHPRMCLALTMRIGAL

SEQ ID NO: 53509 - protein, 412 aa, Oryza sativa
MHEGQENVPFTSPDVEIRRAANKRAEMADDINKLFAFFSECKMQNSKFYWDMQLDEDGVVKNIFWSHASSQAEYADFGDAVTLDTTYKTNIYGMSLAMFVGASHHIQDTLFGCALLRDKKIESFEWLFKTFKNCMEDCPSPRCVLTDQDNVIAVAITNVFPKTIHRLCRWLILKNHSEALNILYARDDRIESELLLCVNQTYTPQEFENAWSWFIDEFDLQDSVTLQNLYEIRHRWIPALFKKDYCGRMTSTQQSESVNKLAKRNFVDHQTNLHSFARRMLDIIISREAKEAAETRACLGMPITKTRWSFVVQMSRVYTRAVFKLFEEALDDCTAFRIDMDIGNTNRWIVLDMEHSEKHDWCQLQFKVLADVQKGRYECECKQWEHTGLLCTHLLRTFIHAQVEKIPPQYVL

SEQ ID NO: 53510 - protein, 349 aa, Oryza sativa
MATVIISYLLVLVLAGAVAVEAILGAPPAPGTSAAKVPAVLAFGDSIVDTGNNNYLPTIVRSNFPPYGRDFPGGKATGRFSDGKISIDLLASALGVKEMVPPYLNKSLSTEELKTGVSFASAGSGYDNATCRTMMTPLTVERQLQLFDEYKARLAGAAVPDRALYLLCWGTNDVIQHFTVSDGMTEPEYADFMAARAVAAVRGLVARGARLLVVVGAPPVGCVPAQRIIAGGVRRQCATPRNQVALLYNRKLGQEIGRLNAKLAGVKIVLVDLYNILADVMHRYQALGFKNGKDACCGYIGLAASVLCNFASPLCNDPPQYVFFDSYHPTERAYKLMVDEVIKRYLRFL

SEQ ID NO: 53511 - protein, 915 aa, Oryza sativa
MVPQKQATIPDEKSGSSVIHEKMISLVHEEITQVVDINTGCLSSLDMTVPSTMNSSRPVLIDQNSKLDDQFGSLQSSSPTMIMSQQFPVSRSSSVLSSDFSPRLLSACPRFHSAPSALGITALLEDHAAFGDTKNSVKVSSAVVKIPSKQSSQQHPITVTPVVTKCTPSPPPLLPPLAPVVPVPSDDQMISQEKDMSQQAQKHPDLSSFPSLSPTQQKQSTSKLCQTILPTNHQLSSSNITKEPLQISPAPTPPPLPTPSTSSSSSCHCLPPDSMLSTTTALFRPPAPPPPPLQSPSTPRCSPVRTLASPPPPPAPTSSPVRMSGPPPPPPPPAPNSCPSRPAPPPPPPPPLASTSSPPRPAAPSPCQLHTSTSSPARPVPPPPPTLSTIRSSAPTPPLLPGATSAPSPPPPPPPCSSSNQLSAPPPPPPSFSKNNGSIAPPPAPPGGNAKLPGMRGRGPAPPSGPMPRSLQSGQAASRRSNLKPLHWVKVTRAMQGSLWEESQKTDEASKPPVFDMSELEHLFSAVLPSSDGKRSDKSGSRASGSKPEKIHLIDLRRANNCGIMLTKVKMPLPDLMSAILTLDDTILDADQVENLIKFTPTKEEAELLKGYKGDKQVLGECEQFFMELMKLPRVDSKLRVFLFKIQFPSQVSDLKRSLNIVNSSAEEIRGSAKLKRIMQTILSLGNALNQGTARGSAVGFRLDSLLKLSDTRARNNKMTLMHYLSKVLSEKLPELLDFPKDLASLELAAKVQLKSLAEEMQAINKGLEKVEQELTTSENDGPVSEIFRKTLKDFLSGAEAEVRSLTSLYSNVGRNADALALYFGEDPARCPFEQVVITLQNFVRLFVRSHDENCKQLDLEKKKALKEAEAEKTKKEPENAQKTKEPGNDKAKHNNSIKELDISLQSPAQTASAK

SEQ ID NO: 53512 - protein, 157 aa, Oryza sativa
MAVSSWLPMVRRLVEQPLSSHQPASPFPPPSTPCRCVGRGAPPLHAQPAAASDRILLTRREPSMDQLKELGWAKRWSSQPYVSCRTTSLQELTRLGIKHVENLVIPSVRNDAVVQYMNDLNAVRGTNQKKTDRGSFWTWLFSLFGCCKKDQELGLPV

SEQ ID NO: 53513 - protein, 81 aa, Oryza sativa; identical to SEQ ID NO: 49345

SEQ ID NO: 53514 - protein, 511 aa, Oryza sativa; identical to SEQ ID NO: 29034

SEQ ID NO: 53515 - protein, 390 aa, Oryza sativa
MVCSDNDTSINVTIPVVMIPQSAGKKMKGLLDQGARLEVQLYSPNRPVVDLSACFLWIMAIGTIVCASLWTEFVACEQVDERYNQLTRKDGPNSGTTNREDKEIFEISAKGAIVFILVASVFLLLLFYFMSSWFVWLLIVLFCIGGIEGMHVCLVTLLTRICKDCGQKTVQLPFFGEVLTLSVLIVPFCTIFAILWAVYRHASFAWIGQDILGICLMITVLQMARLPNIRVASALLSAAFVYDVFWVFISPLIFHESVMIAVARGDNSGEAIPMLLRIPRFFDPWGGYDMIGFGDIIFPGLLVAFSYRFDRASKRGLFNGYFLWLTVGYAVGLFLTYLALFLMDGHGQPALLYLVPCTLGLIVILGWFRGELHDLWNYGRSQTENLVDEP

SEQ ID NO: 53516 - protein, 1172 aa, Oryza sativa
MLQRAASNAYSWWWASHIRTTQSKWLGANLQEMETRVKIMLKLLGEEADTFGKRAEMYYRRRPEVINHVEEVYRAYRALVERYDHLSKELHKANHTIATACPQHDVSLLQEQDDAEFTPIRIQESTTTVQEVLNPKGHARPCAPHFTKQNAQQEIDTLQKAILVLQTEKEFVKSSYETGITKYREIEKQIADMQDQVCHIQNEFDAHASIEDDEARALMTITALRSCQGTVANLVKIFEELVRVAAGESEKVNYLRQKLYAMNYIIDPSKGEVGTTNVAVKNRVYPNTQEILELQPIYEKIEKFFELNSESVVQEMAERVDELVDKVMNLELKFPKQSAQIKQLKEDNDSLKDRLDDLQDEIALRDDPSDLSEQLKLAEDELNRVKALERSVIEEEVLVSTVFSEVVSCITNISKAFGSIDPEDMTSLSAAVENDGEITSDDISTSLPEEEFRGTEEATTDDNLGRDRCRKEDASGVEGHDSLDGTDGIDDCKNGNEENFQSENRLIQEDLMDKRSIQASNNIDRIVIPGKENGFNNACEGKIDCSPSGNTKKYRDIGNDVIDNSVQGESLKGEHPPTVISQTHLPHSECLDTLTNKSDSDEKGSSVVVTVNSFGGSKRIQGLRIGGDENSMSGNSLIQEELRDDKSLKTPGYVNLVGSTNQHSLSDGSTTEEISLPKVSNSCFSDADMRLELCHTEEAISVEEWPKQDGQLIAPETMKSLNGGSKVDSSEKGGRTSLEHMNSIQDLKTSELVDAHSSRVYQQVPKVTTKSNNIASCIPHGELEMRSSDGREHTRQASTLSKPGSMSLRVNSSLVAERDAPSWQEFLLDGIEGREALLLDDYTLILRNYKETKRRLAELEKKNEQHPKETKTVIRELRNANSMKYVEIQSLRDLLDPSEDISSTHSKMGFNRSNHPLDTEISVLEGIDVRHTGVRKNTSPFEVKFRSEIDALVEENLQFLVRFSMACHRMQDFDSKYQELQKGMGDFEVKKTGEPDAAAESDPAEKKLRELRTELDVWFEQNALLDQDLQLKTMSLCRLQEEIAEALRASAETDGGRFTPYEAAKFQGEVLNMQQSSGKIERELQSALKRMRELEGKVNDGLQKLRESFDLSCRRSSLVEEESSSTSYHSQFKHFPTRTRVPLRNFLFGTKPKKKSIFACINPTLQKQFSDL

SEQ ID NO: 53517 - protein, 422 aa, Oryza sativa
MNNASYAFVNGIEIISMPNIFSQAAASVDIAGNEVSTTDSSLQTIYRLNVGGSYVAPTNDSGLSRDWYDDTPYIYGAAVGVTYQANDTVQIKYPKNDPDAEYAAPASVYLTSRSMGPDPKVNKNYKLTWVFEVDGNFTYIVRLHFCELLLSKPNQRVFDILINNKTAQSGADVIGWGGQFVPVYKDYATIMPGGAGDKVLWVQLMPNVGSGSEFFDSLLNGLEIFKMSDSSGNLAGPNPDPSKLLEEAESSAQGKFKSKPSNLKATVIGGAAGGAAAFGIVAAICIVVYQSKKRKVLNNSASHSSGWLPVYGGNSHTSTSKSSGGRSAALINPNITAMCRHFSFGEIKSATKNFDESLVIGVGGFGKVYRGVVDGDTKVAIKRSNPSSEQGVLEFQTEIEMLSKLRHTTLSRSSAAARTRAR

SEQ ID NO: 53518 - protein, 937 aa, Oryza sativa
MECNTVLIGILHLQLSVYGPGRVDPSSLQVLRPALQYSVHVTIPPELLYGRLILVMAKGFCTDAAGHHFIRTANSTFTLRFDRRSDSMNIGSSIPEKLLQIEGATRVVEATNDDKDLRVYLSFAEPVMNSSSQILAALTATDAILTPTNRSTLGNRRFGYLVKRTSNTAVVTVSCDGNSIISRQGTPVSSSEPYTFLYDNQRPSVKLATSTVRTSSRNIPVLIKFAKPVFNFTSSAVQVSGGNLLSFHEASKSIYTAQIQAVDNLVSVHVAENSAQDVAGNTNLPSDRLEVRHYSVPASSSSIAIVTTVIFTATAAFATLLTVSTSSLLASGVIQRPPSYLVSEPSRNLLRMACHIQVFALSRWLSINLPVEYYELSKGLEWSIPYMRLPWEGPSADPFVGYSTMPAIAYSEMLDRTALAADVLRRPPAAPGVAMAMPSTSPLDGKPLTAMEYRYLFENQDMKPEAQIIMKLQDLDGWKYFFRNIFWLAVIAAAFLLLHATLLLYLKLRHRHSHTHVGALVFPRLELMLVILAMPCVSQASAALIRGGTTAGLAVGIVLTGVLTAFLVALLLFLSLGVTTGRLLQYKEVHQEGREYHWYQEIVRRTLGPGKRGQWTWKDPARTACLVKLGPLFEDLRGPPKYMLSQIAGGSGGKRAAERIIVSDDENEDAEAPFLQKLFGILRIYYTFLESVKRVALGIVAGAHASSDHSSRAHAVVVLAIASFQLFFMVLKKPFIKKRVQLVEIVAVASEVLVFAACLRLVDSGGSAVAEGSGVGLAMLTVFAVALAAQVCNEWNALYRQVRLLSSDRRSFVEGAKAAWVGLLLLVLPSSALGEQLEKMKKQQEQPEAVALGGGGGGTERSWLGQLREMAKASFSKEGQGGEAEASGSRAKGGSRSMSSVASSSDSKAKGPENSHSQWSSKSKGLYKDLEAIFSNR

SEQ ID NO: 53519 - protein, 297 aa, Oryza sativa
MGAPKQKWTAEEESALKAGIAKHGAGKWRTILKDPDFSNVLRYRSNVDLKDKWRNMNVTVNASGARDRVKAPVVKKPRSAPKHEGHSTSTAIAAVTSDGDDDVAEPVPLATSTSSKRSLSRLDNIIVEAVRSLNEPTGSYKTAIANYIEEQYWPPADFDHVLSSKLNDLTASGKLIKVNRKYRIAPSSSLSEGRSSKVVLLEDIKKEPTKLDREDVAVLTKSQIDAELARMRTMTAEEAAAAAARAVAEAEAIMAEAEAAVREAEAAEADAVAAQAFAEAAMATFKNRSSAKLIIRA

SEQ ID NO: 53520 - protein, 413 aa, Oryza sativa
MDSRGFDSEGREFSSATEMWAHEIGAAADAPVSAAVAEPAPAPAAGSNGVAGEEEAGGGGKREEWYSKAIAYWQGVEASTEGVLGGYGCVNDVDVKGSDAFLRPLLAERFGAARRHLVALDCGSGIGRVTKNFLLRHFNEVDLVEPVSHFLEAAQENLTECMEVGEDTHKAANFYCVPLQDFTPDEGRYDVIWIQWCIGQLPDDDFISFFNRAKIGLKPNGFFVLKENIARNGFVLDKEDNSITRSDAYFKELFKKCGLYIHSIKDQSDLPKELFAVKMYALVTEKPKIQKNGKRRRPKNSPPVEKSVSDNNSLSVPRFVPADFETRLELIPFVRGVSQLVSPASGPSPFTELNEFDEGCTAVTRSGTFSPLQHGAVRSGPPRRVQGPSTSARGRPWSKKPGARGGGRIPKAG

SEQ ID NO: 53521 - protein, 646 aa, Oryza sativa
MGEGVKAMLAKPIQLADQVAKQAGWQCFRAECMDLRSRAEKLAALLRQAARAELYERPAARIMADTVRALNKAAGMAARCFQSHSRLRRFFTLNPVSGLPRTLAMLDTALEDVAWLLRISSPHADAGGGGDDDDYDLHGLPNIAQNEPILFLIWDHIARLHTGNLAARADAAHNLASLARDNPHFAKLIIEEDGVAPLVKLLKDGTDDGQEAAATALGLLARDEESVDKLLLAGVCSVFAAALKVPPMRVQAAVAESVAALAHHNQKCQDLLAQTNAVRHLVGHLAAGTIQEHSRYYVAWTGSRNMNMTSLHSVVLAKTLSVHQGGSGSPANEPPSSSEYPGSQQQAGKNQMQSVVQSAMAAKTTANGATVPPGCRHQPTPNGSSGRGSREAEDPATKAHMKAMAAKALWKLARGHVGVCKSITESRALLCFAKLLEQGDGGAGTDLQFYSAMAIMEITRVAEHNLALRQSAFKPSSPAAKAVVEQLLRIVCKGDVDDLLRPCITSLGCLSRTFTASETRVVRPLVELLDERELPVTKEAVVALTKFACTENHLHVSHCKAIVDGGGARHLVQLVYLGDQVQIEALILLCYIALHVPENEELAQAGVLAVLLWASKQPHMVQDLRVDALLPDAKGRLELFQSRASR

SEQ ID NO: 53522 - protein, 718 aa, Oryza sativa
MGRADAPWLPLLLLCSSCCFCIWPQKQILVAADTDPNDVTVLNTLFTSLNSPGQLKGWQASGGDPCGQSWQGITCSGSSVTAIKLPSLGLSGNLAYNMNTMGSLIEIDMSQNNLGGGQQIQYNLPTNKLERLNLAGNQFTGNLPYSIFSMSNLKYLNLNHNQLQGNITDVFSSLYSLTTLDLSFNSLAGDLPQGFTSLSSLKKLYLQNNQFTGYINVLANLPLDDLNVANNHFTGWIPSQLKKINNLQTDGNSWSNGPAPPPPPYSAPPPPNRPNSPGQNNGGSSSGGSSGIGGGGVAGIIISLLVVGAVVAFFVIRRRKRRAALEEHFEQHQPFTSFPSNEVKDMKPIEESTTIDVESLPSPASFSLKPPPKIERHKSFDDDDLSNKPVLKKTNVAPIKATVYSVADLQMATESFSMDNLVGEGTFGRVYRAQFTGGKVLAVKKLDSTVMPFHSSDDFAELVSDISKLHHPNLNELVGYCMEHGQHLLVYDFHRNGSLHDLLHLSDEYSKPLSWNSRVKIALGSARALEYLHEICSPSIIHKNFKSSNLLLDSEFNPHLSDAGLASFISDAEFQAAQQSAGCTAPEVDMTGQYTLKSDVYSFGVVMLELLTGRRPFDSTRPRSEQSLVRWATPQLHDIDALDRMVDPALKGLYPAKSLSRFADVLALCVQPEPEFRPPMSEVVQALVRLVQRANMTKRMLDGDTSSRRTDDQEQDFI

SEQ ID NO: 53523 - protein, 399 aa, Oryza sativa
MQSAMHGTVTRLERIGHPPSELVDDKSSDCKYKESCVADKHRRFVPNSANNLNQYDVSPSLTEAISSVVLVTVSETSWASGIILNKNGLIMTNAHLLEPWRFGRTSPLGLQNKIASFSEHICGGENNLLQPQQCKVSNEDAVKHELSLFNFGLKKDRAISVRLDHGERKTWCNASVVFISKGPLDVALLQMEKTPIELCAIRPEFVCPTAGSSVYVVGHGLLGPRSGLSSSLSSGVVSKIVKIPSTQHSQLSSVVEVNNMDIPVMLQTTAAVHPGASGGVLLDSLGRMVGLITSNAKHGGGSTIPHLNFSIPCKSLEMVFKYSAKGDFKILEQLDKPNEVLSSVWALAPTSSPFFSTSPENGRGGKVLEFSKFLADKQEGLKSIKDIEAFLRDRIPSKI

SEQ ID NO: 53524 - protein, 401 aa, Oryza sativa
MEGFSRDLLCGIGKGGDGPRGEVRPRVDMEAEEVELNLGLSLGGRFGLDRRGEKLARSSSVAAILAAPTEPSAPPSGLFRTSSLPTVAAAEAAKKQGVDELNCRRPSGGAEAEPAAARLPASGSPSSGSSDGEGRRLEVNMTDTLMRTSSLPAGIEDEWRKRKEAQSLKRLEVKRKRIERRNSLTSNISKEAVGQILEEMNAGAEKVESCDDVATGNKKTGGNVNHSSDRNRCTGLPPVHRATYTQQRGSLSGIPTKHIPAMKGSADAEEHNVPSAATEHRNGAAIATPPFSALAVRAVALASRGEQLRATGRVAARAKSMGDVERIMMQEMPCVCTKGLPNGKRVEGFLYKYRKGEEVRIVCVCHGSFLTPAEFVKHAGGGDVANPLRHIVVNPIPPSLY

SEQ ID NO: 53525 - protein, 1095 aa, Oryza sativa
MSSNPDGGRSFARRDILLKIQSDAQKWWEESKVFEAEPGNKPPGPGEKFFGNFPYPYMNGLLHLGHAFSLSKLEFGAAYQRLRGSNVLLPFAFHCTGMPIKASADKLSREAQQYGYPPAFPEVEDDSSAEVADSSQADNAASVVPDKFKSKKSKAASKVGMQKFQWEIMRGFGLSDEEIAKFQDPYHWLTYFPPLAKEDLKAFGLGCDWRRSFITTDMNPFYDAFVRWQMRKLKKMGKVVKDMRYTIYSPLDGQPCADHDRASGEGVQPQEYVLIKMEVVPPFPPKLKTMEGRNVYLAAATLRPETMYGQTNCWVLPDGKYGAFEINDTDVFIVTSRAALNLAYQNLSRVPEKPTCLMELSGCDLIGLPLKSPLAFNEIIYALPMLTILTDKGTGIVTSVPSDSPDDFMALQDLVAKPALRQKYGVKDEWVLPFKVVPIINIPEFGDKSAEKVCLDLKIKSQNDKEKLAEAKRMTYLKGFTDGTMIVGEFNGRKVQEAKPLIKNKLLEEGTAVLYSEPEKKVMSRSGDECVVALTDQWYITYGETEWKQKAVQCLEKMNTFSAETRNGFEHTLGWLNQWACSRSFGLGTRIPWDEQFLVESLSDSTLYMAYYTIAHLLQNGNMYGKEISSIRPEQMTDEVWDYVFCDGPAPNSDIPPALLSKMKLEFEYWYPFDIRVSGKDLIQNHLTFSIYNHTALLPEHHWPRGFRCNGHLMLNSEKMSKSTGNFRTLRQAIEEFSSDATRFALADAGDGMDDANFVFETANAAILRLTKEIAWMEEVIAAESSLRAGPPSTYADHVFANEINIAVIETEKSYNAFMFRDALKLGFYDLQLARDEYRLSCGAAGMNRELLWRFMEVQTRLITPICPHYAEHVWRNILRKEGFAIKAGWPIAGTPDPTLRIANKYLQDSIVKFRKLLQKQESGSKKPKKGTAPPPSEQNKLTVGLVYVNENYYGWKEQCLRVLQSKFDSQARLFATDEEINEALKNCSIGQETNFKRVQKLCMPFIKSKKDEARSVGPHALNLKLPFGEMSVLEENLELIKRQVGLEHAEVLSASDEAARAKAGVHASMLDKTPPSPGEPVAIFMSKLDLEARC

SEQ ID NO: 53526 - protein, 543 aa, Oryza sativa
MPTLVAAGGMRATERARHPRSSHGPRPHLDHIMARAMCAHAMEESTDTMEGIMRVVLTCLPTPAPFSTSHGSLSSSAGGGGGSGGGGDDRISRLPGALLSNIVSRLPARDAARTAVLSTRWRRVWASTPLVLDDVDLLDIPDEDLRRGHSHRVDLAAAASRVTRVLTSHRGPYLCVHLTCCNMATHWPMLSYWLSLLAANGVQDLVFANRPYPLDLPLPVDILRIPSLRSLYLAFWTFPGIPGGARGPHVFPHLRELGLCFISIDAQDLDGLLQCSPVLETLALVSNSYSPAHIRVRSRTLRCVLFWMSLAQEIALVVAPRLDRLILWKTFMGFPGEIFCRTRVKIGYATELRVLGYLEPRMHELEIGNTTIEAGTKMSSDKTVPSVKILALKVRFGIRNEAKLLPVFLRCFPNVETLHVMSDDAHDPTGKLNLKFWHDVGPIECLHSHVNKVVFHMFRGERSELAFLKFILERAEALQKIVVVLANRDQAWVDEMRAKLRPLAMAKRASKNPTLLIVALEGGSAWSFHRASDLSVNDPFDYC

SEQ ID NO: 53527 - protein, 60 aa, Oryza sativa; identical to SEQ ID NO: 44965

SEQ ID NO: 53528 - protein, 514 aa, Oryza sativa
MCLPAAAVYGLLMICFVLSHAFLQQQPQLMENVAVAKRSRLEQHRTLSDNSFRVEDLPEEIQSLLLSLLSLKEAASTSIVSRNWRKLWTRYPNLCFDGSKDGPADMDSVKIERMKFIDTVNSIIQQHSGIGLNKFSIRCNLLKDDSDILDRWIRFATASKAKIIDMNLCTNRNNKGPTKHLYDFPLEAFGDQDIPFIQCLFLNNVSIKPHSDIGFTKLRSLHLHCVQIIGDLSGLLFNCSSLEDLEVFACLGVTALNIPHQLNKLRHLLICNMRIQMLEFHVPGLSHFEYKGTMIPIMLHGCSKLQKATLNFHQTWLEEDNNKVLGHVFHGIPSVSAVEVLNLLVDICTKQSVWSSQVHTLTARPTIMFMNLKHLTYEILIFTKDPNSHSGVLQLAQYLAFAPQLETLELHMLYHSTHCRCWHEGAGVSYGHMPHHHLKMVYMSGFRCYRAQVELLFAILEMGDELEHVTIDPMTRVPYSPDLMNLGIPEDEICQWANRTSQRFGKAISVVKPP

SEQ ID NO: 53529 - protein, 727 aa, Oryza sativa
MHGTWLRSIEQLKGHLFHQHRLYMCSLCLEGRKVFICEQKLYTRTQLNQHVKTGDSEVDGSEVERSGFAGHPMCEFCRSSFYGDNELYTHMSREHYSCHICQRQHPGQYDYFRNYDDLELHFRKDHFLCEDEACLAKKFVVFQSEAELKRHNAMEHGGRMSRAQRNAALQIPTSFIYRRNEQDERRGRGRGRNSHRDGSDRDTPSMQNGSAIIGNGFRSRVDNVTGSVSVSSSSGRGESGQSSGNGRVFEHLSFPPLQDQDIPDARMDSAPDETSFPSLSEQQTRYAHALSQSSLAAKLGDELLFPPLPGSSSNRGSTSTQQGLQSLAKNTLASRLQQRSKGSVKVLHSARPRPSENPESVPPVSSSPQMWPTPDQGLLHSSSSQLRIVRENGIMSSADSAWNPGGGASNRMKHSVSTPNLMSGGSSVQALSTSNGGNKKQQPPQSSQTLPAADDVRAANKTLVERMRSALGMDEDRYSAFKEIAGEYRQGIIGTSEYLSYVEQFGLSHLVPEMARLLPDPQKQKELADAYHTNIRFRSLQENSDGLTITSKEGGRKKKGKGKSHDVTETSAAPAKDMKDSLADSFLDTVRKLQLNKTQEGEAEVLSRDGYRSSKGKAQLITGGSSSSTPCLDGDHGAISMASCAKDDVGKGGGSSNSNINKQSKKTSKFLRARLGDNSLATLDLSRPTMSPERPERESQGPQVGLPMRGVWKNGGGQKLFTGNGRK

SEQ ID NO: 53530 - protein, 189 aa, Oryza sativa
MSKKKNKSQLPIKAPLKDAEQGITSDYIGGDALDDLLSKLIKSVEVAKASREGLPEKIWMKRQFAVGVNDVTRVLERMPAATAATHSGHSSTEAITDKALCRAPPVLLQVVLVAADCNPKWLTKHIPTLASTRQVPVLCLKDNKESSLRLGQVVNVRTALAIGVKARDSIINKAIDEVLKTANLVAKEP

SEQ ID NO: 53531 - protein, 721 aa, Oryza sativa
MLISKSPPYPASEETREWEADGQHEHTDELRETTTTMIDGIRTALRSIGEGEISISAYDTSLVALLKRLDGGDGPQFPSTIDWIVQNQLPDGSWGDASFFMMGDRIMSTLACVVALKSWNIHTDKCERGLLFIQENMWRLAHEEEDWMLVGFEIALPSLLDMAKDLDLDIPYDEPALKAIYAERERKLAKIPRDVLHSMPTTLLHSLEGMVDLDWEKLLKLRCLDGSFHCSPASTATAFQQTGDQKCFEYLDGIVKKFNGGVPCIYPLDVYERLWAVDRLTRLGISRHFTSEIEDCLDYIFRNWTPDGLAHTKNCPVKDIDDTAMGFRLLRLYGYQVDPCVLKKFEKDGKFFCLHGESNPSSVTPMYNTYRASQLKFPGDDGVLGRAEVFCRSFLQDRRGSNRMKDKWAIAKDIPGEVEYAMDYPWKASLPRIETRLYLDQYGGSGDVWIGKVLHRMTLFCNDLYLKAAKADFSNFQKECRVELNGLRRWYLRSNLEKFGGTDPQTTLMTSYFLASANIFEANRAAERLGWARVALLADAVSSHFRRIGGPKNSTSNLEELISLVPFDDAYSGSLREAWKQWLMAWTAKESSQESIEGDTAILLVRAIEIFGGRHVLTGQRPDLWEYSQLEQLTSSICCKLSRRVLAQENGESTEKVEEIDQQVDLEMQELTRRVLQGCSAINRLTRETFLHVVKSFCYVAYCSPETIDSHIDKVIFQDVI

SEQ ID NO: 53532 - protein, 562 aa, Oryza sativa
MASQAWVADRAAAIMRKKPNCGAKELKTILEERYKAEIELRCPGSRVEIGTKEVNGQVHFERFFCCFEPCITGFLLGCRKYLSIDSTALNGKWNGHLAASNALDGHNWMYPMAFGFFDAETTDNWTWFMEQLAVCIGHVEDLAICTDACKGLENVVERVFPNCEERECFRHLMENLTKRKTGTVYGNLWPAARAFRSEIYDYHMDKVLSADPDVGDWLYKHHKILWARSKFSPKIKCDFITNNVAESWNAWIKEFKELQVDALADAIREKTAALWAKRRKIGEKLEGRNILPAIVTQLKAATRGLANMRVMKGADDTAEVTELHNSVEVYRHVVYLDQQKCTCREWQLTGKPFSHALAAISKQRNPIMDDFVDPVFSVSCFRAAYEGVIPCITDKSQWPTANKDFKLQPPVPKPRTVPRQRKNMIPSCLEKGKGKIRRQVKCPRCGGLGHRQSSQKCPLNGTKKRKRKAKNIATKARKKKTAKEIVETPTRSKVARVQLVDSPARVTRSQTRTTGTPTIAREGCSQDSPGPVTRRRLAMTEATPSQPLPPTKKKLTPKKKQN

SEQ ID NO: 53533 - protein, 518 aa, Oryza sativa
MVKAYIAIFSIAVLLLIHFLFRRRGRSNGMPLPPSPPAIPFFGHLHLIDKPFHAALSRLAERHGPVFSLRLGSRNAVVVSSPECARECFTDNDVCFANRPRFPSQMLATFNGTSLGSANYGPHWRNLRRIATVHLLSSHRVSGMSGIISGQARHMVRRMYRAATASAAGVARVQLNRRLFELSLSVLMEAIAQSKTTRREAPDADTDMSMEAQELRHVLDELNPLIGAANLWDYLPALRWFDVFGVKRKIVAAVNRRNAFMRRLIDAERQRMDNNDVDGGDDGEKKSMISVLLTLQKTQPEVYTDTLIMTLCAPLFGAGTETTSTTIEWAMSLLLNHPEILKKAQAEIDMSVGNSRLISVVDVHRLGYLQCIINETLRMYPAAPLLLPHESSADCKVGGYHIPSGAMLLVNVAAIQRDPVIWKEPSEFKPERFENGRFEGLFMIPFGMGRRRCPGEMLALQTIGLVLGTMIQCFDWGRVDDAMVDMTQSNGLTSLKVIPLEAMCKPREAMCDVLRKFM

SEQ ID NO: 53534 - protein, 253 aa, Oryza sativa
MLERSFEEENKLEPERKTELARRLGMAPRQVAVWFQNRRARWKTKQLEHDFDRLKAAYDALAADHHALLSDNDRLRAQVISLTEKLQDKETSPSSATITTAAQEVDQPDEHTEAASTTGFATVDGALAAPPPGHQQPPHKDDLVSSGGTNDDGDGGAAVVVFDVTEGANDRLSCESAYFADAAEAYERDCAGHYALSSEEEDGGAVSDEGCSFDLPDAAAAAAAMFGAAGVVHHDAADDEEAQLGSWTAWFWS

SEQ ID NO: 53535 - protein, 690 aa, Oryza sativa
MVVVHGQRAEDSFGGFFSFDEDAASEDMSLDGLDEELEEHKDYDVLISILANGEKQRDMATLVEGNLGHAEQDLIQDYVEDSDNLVLLHDQIHDCDIILSQIGSLLTGFQVHIGSINSELRSLQERSLDISVRLKNRKLVETKLAKFVEEIVAPPSLVTVIIDGEINDGYAKSLEILSKKLRFSQVDPMINASNSLKDIKPELERLLQKALCKVSDYLTELFFSMRKPGTNIQILQQNMVQKYRYLILFLREHGSKVYTDVRATYADTMNKVLSAHFQVYIEALEKLKLDIGVSSDLTGYDTNIIDLISRGREHLRNHRFMFSLGERASILKEIDRPGLVPHISEVNPVKYPYEVIFRSIQKLLMDTASSEYLFIKAFFGEESLFYQVFQGPFKVINGHLDHTLRNYHDAVCLMLMICITRKHQLVMLNRRLPCLDAYLDKVLIYLWPRFKTVFDMYLQSLYRCDTKLLWVDGSHPHHIVRCYVEFTASLIQLNAECGDGQLDMNLERLRLAVDNLLGRLAENFANPKTQHLFLLNNYDMTISVLKEAGDEANKLQSYFEEKLESNMISFADELLMEHFKDLIKFVRSRVSEDLILYTECPSIADVEPIVKNFAVTWKTALELMHNEVVTSCSNLLAGMEILKAAMVQLLNDYNRLSECVKIIPGGSTLNRNLVSITSISYEMRKYSITL

SEQ ID NO: 53536 - protein, 815 aa, Oryza sativa
MDGDGWVWVRRPADDDEEERPLKVVFDSPAEHFTDAAPIGNGSLGAMVWGSVASEKLQLNHDTLWTGVPGNYTDPNAPYALAVVRKLVDGEKFVDATEAASGLFGGPTEVYQPLGDINLEFDSSSLGYTSYKRELDLRTATVCISYNIGEVQYSREHFCSNPHQVFATKISANKSGHVSFTLSLNSQLNHNVRITNANEMIMQGTCPGRRPALHHNGANDAIGIKFATAVGLQIGGTSAKVTIIDDQKLRIDAADWVVLLVAAASSFDGPFVNPSESKLNPEVAALITLNISRNATFSQLKAAHLEDYQGLFHRVTLQLSQASMLEKDILEEVDHDVKTTAERINSFRSDEDPSLVELLFQYGRYLLISSSRPGTQVSNLQGIWNQDFAPAWEASPHLNINLEMNYWPTLPCNLTECQEPLFDLIGSLAVNGTKTAKVNYQASGWVTHHVTDIWAKSSAYYVDAMYALWPMGGAWLCTHLWENYQYSLDKEFLEKRAYPLLEGCAMFLIDWLIKGPGDYLETNPSTSPEHPFIAPGTGGHLASVSYSTTMDISIIREVFLAVISSAEVLGKSDTNLVERIKKALPMLPPVKISKDGTIMEWAQDFEDPEVHHRHLSHLFGLYPGHTITMQKNPEVCKAVANSLHKRGEDGPGWSTTWKMALWARLLNSENAYRMILKLITLVPPGGKVDFEGGLYTNLWTAHPPFQIDANFGFTAAIAEMLLQSTHGDADLYLLPALPREKWPKGYVKGLRARGNVTVNISWEKGELQEATVWSSNPKCTLRLHYGEQVAMVTVLGGNVYRFNGGLQCVETYMAP

SEQ ID NO: 53537 - protein, 502 aa, Oryza sativa
MLTILRVHLPSEIPIVGCEITPYVLLRRPDGGISTEDVHEAIPLDGHFMRYKWYRIQSDRRVAVCNVHPTEQATIQCLGCLKSKIPVAKSYHCSAKCFSDAWQHHRVLHERALSALNENGNEEEELFGRFGSGNAGIINASLSGSTSNIGQSSSVNNGPTPVYPTGTEKNSGETWFEVGRSRTYTPTADDIGHALRFECVAVDSETRSSVGAPTSIMTSRVIPAPTPTPRRLIPVNSADVMGHFDLDSRNSSFGTFTVLSYNILADTYATSDTYSYCPTWALSWPYRRQNLLREIIGYHADIICLQEVQSNHFEEFFAPELDKHGYQALFKKRTTEVYTGNLQSIDGCATFFRRDKFSHVKKYEVEFNKAAQSLTDAIIPAAQRKVALTRLIKDNIALIAVLEAKFGSHGADNPSKRQLLCVANTHINVHQDLKDVKLWQVNTLLKGLEKIAVSADIPMLVCGDFNATPGSTPHGLLAMGKVDLMHPDLAIDPLGICDQQAS

SEQ ID NO: 53538 - protein, 173 aa, Oryza sativa; identical to SEQ ID NO: 34447

SEQ ID NO: 53539 - protein, 467 aa, Oryza sativa
MDLLTSAMKRCCNGKTLLRGGRTCRCSSASAIGSSGVRGKEEASTSAADSEPDKKRWRKKRFWRKKKKKAKKDHYGDAAATEHGSERASCRRYENDAVADLVNDISSKSDVCNVYAAEGILRITHQNIPSMVLTYRQLCNATDSFSPNNLLGEGGFGRVYRGHLEEINEIVAVKQLDKDGFQGNREFLVEVLMLSLLHHPNLVKLLGYCTDMDQRILVYECMRNGSLEDHLLDLPPKAKPLPWQTRMKIAVGAAKGIEYLHEVANPPVIYRDLKTSNILLDEDFNSKLSDFGLAKLGPVGDKSHVSTRVMGTYGYCAPEYAMTGKLTKTSDIYSFGVVLLEIITGRRAIDTSRPTHEQVLVQWAAPLVKDKKRFVRLADPLLEEKFPLKGLYQALAIASMCLQEDASNRPMISDVVAALSFLAEQKYHPQDGPDQAARKSRDRDCSNPPRKTDMVSEIKADDEIKHR

SEQ ID NO: 53540 - protein, 750 aa, Oryza sativa
MDHSTSLLRLIFLALGAALVVLVVRSAFRLPGDIDTTTTSLFDDGNGGSCTRFSPWACRQGRGDPRSKPSKPRRPSHESDVPRHPLDPLTVREVNRVRELLRAHPLFASAPSSLFVHSLELDEPEKSVVKSWRKGADPLPPRRAVAVVRFRGESHVLGVDFSEGDGAVTPLPVPASGYPMMNMDEQTSLCFAPFKDEAFNASLLRRGVRASDVACLPISLGWYGPAEENRRLIKSQCFSTEGTANFYMRPIEGLTVLVDMDTAEVLHVSDRGAGIPIPAAANTDYRHGHSAPTPAEAQAQGRHGYQTVRVPSMEPPAGGPGFELVDGHTVRWGGWEFHLKPDARAGMVVSRARVQDPATGEHRDVMYKGMASELFVPYMDPTEAWYFKTYMDAGEYGFGLQAMPLVPLNDCPRHARYLDAVFVAADGRPYVRENMICVFERYAGDIAWRHSESPITGMDIRESRPKVTLVARMAASVANYDYIVDWEFQMDGLVRIKVGLSGILMVKGTQYSHMNQVHQNDNMYGTLLSENVIGVIHDHFVTFRLDMDIDGADNSFVKVAMARQNTGAGESPRKSYLKATRHVARTEKDAQVRLKLYEPSEFHIVNPMKKTRVGNPVGYKVVPAGTAASLLDPEDPPQKRGAFTNNQIWVTPYNKTEEWAGGLFVYQSKGEDTLATWSERDRPIENKDLVLWYTLGFHHVPCQEDFPIMPTVSSSFDLKPVNFFESNPILGQRPTQENDLPVCAAAATTS

SEQ ID NO: 53541 - protein, 707 aa, Oryza sativa
MVAVARGRRCRGVVLLLLLSSVLAPLVLYGGSPVSVSTLPDSTVASGVLDRDGEYNLVVAASDVSLTKDLTIERLGEHKNRVLSATEDWQVVEAASKNPAFEKSDASVSRKDPGSGDANVVITEGNGAAQSGRDGVIWEVVSRDRGSDGFTQPWEINGGEERDGERVDRVKLGVSVEEQNDGTGETGVNNIAGTHTSGNLNSSLEKERSTGRLSEQVTKAIPKESYTPTTNSNSALPTSVSAGHSTTSPDATIRTIKDQLTRATTYLSLVASRGNHGFARELRARMRDIQRVLGDATSGGQLPQNVLSKIRAMEQTLGKGKRILDSCSGALNRLRATLHSTEERLQSHKKETNYLAQVAAKSLPKGLHCLPLRLTNEYYYTNSNNKKFPHIEKLEDPKLYHYALFSDNVLAAAVVVNSTIIHAKKPADHVFHIVTDRLNYAAMKMWFLANPLGEAAIQVQNIEEFTWLNSTYSPVMKQLESQSMIDYYFKSGQARRDENPKFRNPKYLSMLNHLRFYLPEIFPKLSKVLFLDDDTVVQQDLSAIWSIDLKGKVNGAVETCGETFHRFDKYLNFSNPLIASNFDPRACGWAYGMNVFDLSEWRRQKITDVYHNWQRLNENRILWKLGTLPAGLVTFWNRTFPLHHSWHQLGLGYNPNINEKDIRRASVIHYNGNLKPWLEIGLSRYRKYWSKYVDFDQVFLRDCNINP

SEQ ID NO: 53542 - protein, 427 aa, Oryza sativa
MAGDGEDGGERVRLFVGQVPRSMAEEDILAVVRAAARADDATVIRDRATGASRGCCFVVCSSREEADKAIAAYHNKCTLPGASRAMQVKYADGELERLAAEQKLFIGMLPRDVKENEVSALFSQYGNIRQLKVLRSPQKTRKAAACAILEFGSKEHARAAIEALNGTRVVFNGSSATLVVKLADTEREKQARKAQKAQAQPSKPLRFYLFPQLLSISGAPQMSFLPPYNVLDYKVPGHYGHTKNPLALYSTMYPHVNQGNLLQGLNTNIFPGTDPKISNLIQSAGYIQPPYPDLSGLHYPVSYAGALVGDTPQYFSDGKVNIPNSHSNHASSAANTKIGSKIEGPPRANLFVYDIPQEYGDEDLANLFQEFGRILSTKVFIDRATGVSKCFGFVSYDTPASAQAAIRRMNGSQIGGKMLKVQLKRET

SEQ ID NO: 53543 - protein, 919 aa, Oryza sativa
MGCGQSKMEEEYAVRHCRERSELLALAIRHRYALADTHRAYAESLAAVGAVLHDFLRGVQSLPPPPLEPTLRLPAHRKGDNLPTASPVPANPAIASSSAAQPLPPVAKQVRIAAAPDDGGGGGHIHFSDDDSDSEGGGHIKFHSDDEGDAPAHRRPEIVRSAAPPVAPPPQMGPPPPYGSGYAPPPPYGSGYGYGYGPAPDYGGGMAVANGGYDPGYGGMGGASGGGGGGGYAPGYGGMGVGDGGSGGGYEPAYGGMGSYGQSFFNISYARSQPPPPSVSYEHRLQATDARVHYYAGEGNPQAPPLGYGGGYGYPPQGSSSYNQYAYGGYYGGASPPPPADIPSTSRGEVTPPAPPSPPRVSTWDFLNPFETYESYYEQPTAAQASYTPSRSSKDVREEEGIPDLEDEDMEVVKEAYGDEKHAANGYSGKGKMAKEEGGRSSTGDELPHESKLSEASSSGSNQEHDVHVVEKSVVGEQVQRSEPRQHVAGLPPIGSEKTYFDDAEVVLEIRTQFERASKSAIEVSKMLEVGKMPYYPKSSGFKVSAMMICGIPTMEEEFLRFEEDKAMGCGNLSSTLQKLYMWEKKLLEEVKAEEKMRALYDRQREELKILDEKGAEADKLEATERSIRKLSTKISIAIQVVNTISDKISKLRDEELWPQTCELIQGLMRMWSTMLECHQIQLHAISHAKNIDSMINGAKFGEAHMDLIKRLELQHLDWIASFASWVNAQKSYVGTLNDWLRKGVTYEPEVTDDGVPPFSPGRLGAPPIFVIYNNWAVGVGRISEKEVVEAMQAFASNVLGLWERHRSEQRQGLMANKGMDKDLRVMERDEQSMRKALEAQNKKLVLISNQSGVSLSAQAQALQDGGSHGDTGSLQLSLKNIFEAMENFTANSANTYKDLHLRAEEEKARVAQESCRVS

SEQ ID NO: 53544 - protein, 106 aa, Oryza sativa
MKMVGESEGGGGGALRSATSSTPSTSPCGGGPLCRQRRRPPLHPPLPVLGRHRSMRRLERVLQRRTRRRRELSWVAVVGSLRLLHPPPFFVQFFLLFDFDFPLCCD

SEQ ID NO: 53545 - protein, 698 aa, Oryza sativa
MPNMFGFSRSRMRIGRSKGHSTDPLDSSKSPSGLVKHLSLPNGDDQITTSVSGRVDDLAFRCSSDTYDLDDRALVSSRNWAVLSTEGSRPSPRFAHAAALVGSKMVVFGGDSGDQLLDDTKILNLEKLTWDSVAPKVRPSPNRRPSKLPACKGHCLVQWGNSVILVGGKTEPASDRLAVWTFNMGTEVWSLMEAKGDIPAARSGHTVTRAGATLILFGGEDTKGKKRHDLHMFDLKSSTWLPLNYKGSGPSPRSNHVAALYEDRILLIFGGHSKSKTLNDLFSLDFETMVWSRVKIHGPHPTPRAGCSGVLRGTKWYIAGGGSKKKRHAETWAFDVVEYKWSVCVVPPSSSIATKKDFSMVPLYHRDKIVLVAFGGNRKEPSDKVEILVVLQNEHSFSRRSAPDVDPLLYEYSPSTKELASHLNNCAPLYSNSSVARHSLASTVEHPPRRELLSEPLLQNPNLGASLHRQFHQSEACSLAQKLQKPVDDDKYDDTDDCSSCQASTPKEYRSKRTGTDAQINMARILSSKEENLETTGSSARRIARCSSDISHLYNTKIVDLIKRSSALEDQLATALVSKEQAEKNLSSVINSREQLERRLANKEKEAEMLKEKIAGLELAQEESNNLSNTVHADNVRLEREVAFLKAITDETQKELHSTRRVLAGEQSRAFQLQVEVFHLKQRLQMEGRAGTPKNPPV

SEQ ID NO: 53546 - protein, 210 aa, Oryza sativa
MNSLKRRNNNFDMDPDEVMLVEALWLSLQDQEASGNPTCGNTVSSVHPPRSFEGSMTIPAEAASSSSAFACAVAALAEQQQMYGEASSTATCHTSRCDILSRSDRSFTEDLSINGSGSSGARSEEPSSNKMHQTREGMEYSNERWSEMAEASSSFTGSDLTTEAGAANSGGSDTGAGSIPDSFEEQMMLAMALSLADARAKASSPGLTWR

SEQ ID NO: 53547 - protein, 209 aa, Oryza sativa
MRKQVVGKWPADVTARLDLVFADAPFPAEGKSDAVGIFDPPYYEWFQFDKNFTEYRNFDECLNYIEELMIKEGPFDGLMGFSQGSILSGALPGLQEQGLALTRVPKIKYLIIIGGAKFQSPTVAEKAYANNIKCPSVHFLGDTDFLKTHGEKLIESYVDPFIIRHPKGHTVPRLDEKSLEIMLRFLDKIEKETALEHSSTDVDEKEMYL

SEQ ID NO: 53548 - protein, 38 aa, Oryza sativa
MIMISGMIITSSLGEKHMILHKLRYSKAGTTLSRTILR

SEQ ID NO: 53549 - protein, 1187 aa, Oryza sativa
MQLLGNTAPTHLESAVSMPMPSEFSAAAAVAPPAPLPAMPSAPPARMPSSSSSKMPRGRLLGPGDRAVHDVDSRLPGEAQPPQLEVTPITKYTSDPGLVLGRQIAVNRTYIVYGLKLGNIRVLNINTALRSLLRGHTQRVTDMAFFAEDVHRLASASVDGRIYVWKIDEGPDEQNKPQITGKIEIAIQIVGDAETYHPRICWHSHKQEILFVGVANCVLKIDTTKVGRGMDFSREEPLKCPLDKLVDGVHLVGKHDADITDLSLSQWMTTRLASASKDGMVKIWDDRKSVPLSVLKPHDGQAVYSVSFLTAPEHPQHINLITAGPLNREVKIWASTNDEGWLLPSDSETWRCTQTLELVSSLEHRFEEAFFNQVAVLPQASLILLANAKKNAIYAVHVEYGPDPASTRLDYIADFTVAMPILSLTGTHESQLDTEQIVQVYCVQTMAIQQYGLELSLCLPPTADNPGFGRDPAISHVYERPPAEVTVVESSKETSLIDSSVVGPTKPASNNQALEANVPSQVQSTTPPSSIDLGYLEEGALRRGPSRGPSLGDRDIDPSSLDYSSKKRMDSDGASGQGSFGRKDSFGKEEPRGSQGDGVLSSPETIATGSSQNVEVDAKHVDGRKSERSVELEAVKETQIVHEKRERPPKTAEQTVNTISERLVTTDKYSVEDSQSRSADGSVSTLLKHPSGAGDENTVSEAPEKTSDGYASRNLQLTLATKEEKVLHPQVSRQLSPSTSTYNSADSSHEPPSNVNPPIDNVPQVGIQETLQQLMAMHSDLQKQLSTIVSAPIAKEGKRIETSLGRNMEKSIKANIDAMWARFQEENAKHEKAERERMQHITTLITTAVNKDIPVMLEKSLKKEISSVGPAVARTTAPIIEKSLSSAVSDSLQKVHGDKVVNQLDKSLSTKLEATVARQIQTQFHTSAKQALQDALRSSFESTIIPAFEQSCKTMFEQVDGAFQKGMSEHGAAIRQQVATAHTPLAQTLRETIASASSINQGLASELLDGQRKLLALVSSGGSLSHNTSVLQPSNGPVASLPEVDAPLDPVKELSRLISERKFDEAFTMALQRSDVSIVSWLCSQVDLHELCRMNPIPLNQGVLLALFQQLACDIVNDTPRKLEWMTAVAVAISPTDPMIAVHVRPIFEQVYGVLNHQRSLPASSSSEATNIRLIMHVINSVLLTYK

SEQ ID NO: 53550 - protein, 422 aa, Oryza sativa; identical to SEQ ID NO: 32842

SEQ ID NO: 53551 - protein, 546 aa, Oryza sativa
MVGLGAMPGYGIQSMLKEGHKHLSGLDEAVLKNIDACRELSAITRTSLGPNGMNKMVINHLDKLFVTNDAATIVNELEVQHPAAKILVLAGRAQQEEIGDGANLTISFAGELLEKAEELIRMGLHPSEIIIGYTKAINKTVEILEDLVEKGSENMDVRNKEEVVLLMRSAVASKQFGQEDILCPLVADACMQVCPKNPANFNVDNVRVAKLLGGGLHNSSVVRGMVLKNDAVGSIKRVEKAKIAVFAGGVDTSATETKGTVLIHSAEQLENYAKTEEAKVEELIKAVADSGAKVIVSGAAVGDMALHFCERYKLMVLRISSKFELRRFCRTTGSIALLKLSRPNADELGYADSVSVEEIGGARVTVVKNEEGGNSVATVVLRGSTDSILDDLERAVDDGVNTYKSMCRDSRIIPGAAATEIELARRLKEFSLKETGLDQYAIAKFAESFEMVPRTLAENAGLSAMEVISSLYAEHAGGNTKVGIDLEEGGCKDVSIMKIWDLYVTKLFALKYSADAACTVLRVDQIIMAKPAGGPRRDAQPGMDED

SEQ ID NO: 53552 - protein, 74 aa, Oryza sativa
MIMGEVEHLLYTHFSAGMQSSACFQTSNRQTKSFQRTISLELVALFPLHSKDSWRSTGSYGLVYYFLFCLAHAW

SEQ ID NO: 53553 - protein, 295 aa, Oryza sativa
MVNKYYDLATSFYEYGWGESFHFAHRWNGESLRESIKRHEHFLALQLGVKPGMKVLDVGCGIGGPLREIAKFSLASVTGLNNNEYQITRGKELNRVAGVSGTCDFVKADFMKMPFSDNTFDAVYAIEATCHAPDPVGCYKEIYRVLKPGQCFAVYEWCITDHYEPNNAHTRGSRMKSSLARGLPDIRSTQPCLQAAKDAGFEVIWDKDLAEDSPVPWYLPLDPSRFSLSSFRLTTVGRAITRTMVKALEYVGLAPQGSERVSNFLEKAAEGLVEGGKKEIFTPMYFFLVRKPISE

SEQ ID NO: 53554 - protein, 569 aa, Oryza sativa
MTTMRASAALLLVAAAVLAAVRAEDPYHFFDWKVTYGTRTIMDVAQKVMLINDMFPGPTINCSSNNNIVVNVFNQLDHPLLFNWHGIQQRKNSWMDGMPGTNCPIQPGTKLDVQMAAQGPDRDLLLLPQHGHAARGRRLRDHHRAQPAAHPGALRRAGRRLPGPRRRLVHQGPHRAGEEPRRRQEHRPAGGSRHQRQEREGRVQPAHVHHGGRQGVPVPRLQRGDQDVAQRAHPGPQPQARGDGGLAHRAEQLRLAGRACRPVRLLPRHRRPEARRLPPRGLHPLLEGVQRHHRHRPVQRVEHAGVAQAAGGAERVGVVHQPVEVVPLEPDGERGAAQPAGVLPLRADQHHAHHQALHQQGEGGRQGAVRPQRRVARRRRPDAAQARRVLQRLLRGVRVQPHRRRAAGHHRPAEARAQRHLRRVPHLHRGRLREPREEHRLLPHQRLRLLRRRHGAGDMDAGVQEDVQPAGHGEPAHDPGVPEVVDGGDADVRQRGDVEHQVQHVGEVLPRGAVVRQRGIAGEVAPGRVQHAGDSPPLRQGRRPADAAVLPPRIIKQNPQPSSGTHPWC

SEQ ID NO: 53555 - protein, 637 aa, Oryza sativa
MARRAPWLAGIGAVPFLIVVVVAVVGAAVPAMGRFVVEKSSVRVLSPEHIRGHHDAAIGNFSVPDYGGTLTGVVVYPDKKATGCAEFDAKFKSKSRRPVILLLDRGECYFALKAWNAQQAGAAAGLIADNVDEQLLTMDTPEESPETEYIDRISIPSALVNRAFGESLKRMSSPSPSSEAAVEVVVKLDWRESMPHPDERVEYELWTNSNDECGARCDEQMEFVRGFRGHAQIMERGGYALFTPHYITWYCPEAFKLTQQCKSQCINHGRYCAPDPEQDFGEGYEGKDVVVENLRQLCVHRVANETGRPWAWWDYVMDYKIRCSMKEKKYSKGCAEDVVKALGLSLDKVLECMGDPEADTDNAVLAKEQEDQIGRGSRGDVTILPTLVINNVQYRGKLERTAVLKAVCAGFKEGTEPRVCLSNDIETNECLHRNGGCWRDEKTNVTACKDTFRGRVCECSVVNGVQYEGDGYIGCKAVGPGRCTVDNGGCWSETRGHQTFSACSDTALTGCRCPPGFQGDGHKCEDLDECKEKLACTCPNCHCKNTWGNYECKCKGNQIYIRGEDTCIANSMSRFGWFITILVASCVAGVGIAGYVFYKYRLRSYMDSEIMAIMSQYMPLDSQNNENQPLRQHDSEA

SEQ ID NO: 53556 - protein, 534 aa, Oryza sativa
MSGGDGEEAAAAAAAATLHIRCTNGSKLAVRADLGLSVGAFKAIVAESCDVPAPQQRLIYKGRILKDEQTLASYGVETDHTIHMVRGAAPPPASTAPPAANNVTPAINATTASNSPAVGFGGLLHGLGGSGSANSGGLGSFGSGLPELSQMQQQLSENPTLMREIMNMPLMQNILNSPDLIRNIIMNNPQMREIVDRNPDLAHVLNDPSILRQTVEAARNPELMREMMRNTDRAMSNIESSPEGFNMLRRMYETVQEPFLNATTMAGEGDRSSNPFSALLGNHGSNQARDPAANSPTTTSESTTGSPAPNTNPLPNPWSTTAGAAQGATRPSPVTNARSATAGGLGGLSSTDLGGMLGGGSDTSFLSQVLQNPTMMQMMQNIMSNPQSMNQLLNINPNVRNMMESNTQLREMFQNPEFVRQLTSPETLQQLISFQQSLMSQLGQQQAGPERTQSGAGAGNTNLNNLMSMFSGLGAGGGLGVPSAPNVPPEELYATQLAQLQEMGFFDTQENIRALIATAGNVHAAVERLLGNIG

SEQ ID NO: 53557 - protein, 273 aa, Oryza sativa
MRSGGGGRATRRGQGTGPRRAAPALPRSSCDAPPPRWDGPSDPAPPLAPSLTPNPNPAMAPLLPAPLLLPLVPHPREQEQQENAEEGEEQRPRPTPTTMEKKVVEPSKKKKFVDLKSMWGRAEKKLKSIVDSNNISEHSARRKDPEPATIHAPATKEIGCSRACEVGFAQTETQVPYESIEVSRPQDVDGSIEVSKPHVANSESEEEDDWLEDVDEDVGFLPHDPGKRIAISDYSVYQQDEVRMKYIALGPCRPPLEQFPQRNCGVGTLLALC

SEQ ID NO: 53558 - protein, 656 aa, Oryza sativa
MPRKVVSGPDYDDEYDDDYDEYDEDYDDYGETGHSDDIQHPVKEEKESSKKSSSTVPVLWRCSMCMFDNHESMVYCEMCGVFRESFMKSAKDGSIKVHGIPSDFGTPSMPKSDCTKMPVNTRTTDFDGDPEIKNASISHEKVGSTQYTSAGSSSGAGKKLKEDQSSRASSSAQNEDVAQKLSSDIQKLGLEKNEVDTAKPYLPEEYKPEKWMFANEESGVLSQLNLAIVGHVDSGKSTLSGRLLHLLGRISKKDMHKNEKEAKEKGKGSFAYAWAMDESSEERERGVTMTVAVAYLETKKYRVVLLDSPGHKDFVPNMISGATQADAAILVVDACTGSFEAGMDGEGGKSVGQTKEHAQLIRSFGVEQLIVAVNKMDAIGYSKERFEFIKVQLGSFLRSCNFKDSSVTWIPLSAVENQNLIKIPSDVRLTSWYQGFCLLDAIDSLQLPSRDVSKPLILPICDVIKSQSTGQFAAFGKLETGAIRIGSKVLISPCGEVAAVKSIERDSNSCDIARAGDNVAVSLQGIDGSKLILGGILCNPGFPVPVSNFLELRVLVLDVTIPILIGYQVEFHIHHVKEAARVTKIVALLDKAGKPSKTAPRFLKSKQNAVVQVTLDAPVCVQEFSKCRALGRAFLRSSGSTIAVGVVTRVLRQDQN

SEQ ID NO: 53559 - protein, 734 aa, Oryza sativa
MDVELNSRALMDEALKARDAAERKFHARDVKGARRSAIKAQNLCPSLDGISQMVSTLEVLLASESKVDGENDWYRILSLSASADEEEVKKQYRKLALQLHPDKNKSVGAEGAFKLISEAWAVLSDKSRKMQYDQKRKDHPVTNGANGLYTYDKKAHKRARKNAAASAAAAAAAAAAAAEATTRPVGLDTFWTSCNRCRMQYEYLRIYLNHNLLCPNCHHAFMTVETGYPCNGTSSSFSWSTKQQQQNHKHSYSSASRTSGVPGTGHGVYQQENTYETYNNQSFQWNQYSKTNNSAGTNAYSSTASEKPKRKHEESYIYNYSSSGNEFGQERPTSGRGRFSKRRQNINNGYASVDCNGDNKETVAATAGTTVLADVGRVNGTSVEKFRSAVSGRRANVMREIFQLDTRGLLIEKAKAAIREKLQDLNISATRHIAAKGKAERKNHVDHDVKGNGILPHNPSHKFKICNSKGADVENPATDENNLEQKRVPVSIDVPDPDFYDFDKDRTERTFDNDQVWATYDSEDGMPRLYAMVQKVISRKPFRIRMSFLNSKSNIELSPINWVASGFSKTCGDFRVGRYQIFETVNIFSHRVSWSKGPRGIIKIVPKKGDTWALYRNWSSDWNELTPDDVIYKYEIVEVIDDFTDEQGVTVIPLLKVAGFKAVFHRRTDSDVVRRIPKEELFRFSHRVPSRLLTGEEGNNAPKGCHELDPAATPVDLLKVITEVKEVATTEISE

SEQ ID NO: 53560 - protein, 700 aa, Oryza sativa
MASSVAAAAAPTAGGPPGKRQASGGREGDQLIITPLGAGNEVGRSCVYMSFKGRTVLFDCGIHPAYSGMAALPYFDEIDPSTIDVLLITHFHLDHAASLPYFLEKTTFKGRVFMTHATKAIYRLLLSDYVKVSKVSVEDMRFDEQDILRSMDKIEVIDFHQTLEVNGIRFWCYTAGHVLGAAMFMVDIAGVRVLYTGDYSREEDRHLKAAELPQFSPDICIIESTYGVQQHQPRHVREKRFTDVIHTTVSQGGRVLIPAFALGRAQELLLILDEYWANHPELHKIPIYYASPLAKKCMAVYQTYINSMNERIRNQFAQSNPFHFKHIESLNSIDNFHDVGPSVVMASPGGLQSGLSRQLFDKWCTDKKNSCVIPGYVVEGTLAKTIINEPREVTLANGLTAPLHMQVHYISFSAHADFPQTSTFLDELQPPNIVLVHGEANEMSRLKQKLISQFDGTNIKVVNPKNCQSVEMYFSSEKMAKTIGRLAEKVPEAGESVNGLLVKKGFTYQIMAPEDLRVYTQLSTANITQRIAVPYSGSFEVIKYRLKQIYESVESSTEESDVPTLIVHERVTIRLESESYVTLQWSSDPISDMVSDSVVAMVLNIGREGPKVVPVEEAVKTQEETERVAQKVVYALMVSLFGDVKVAEEGKLVISVDGQVAHLDGRSGGVECENATLRERIKTAFRRIQGAVRPIPLISS

SEQ ID NO: 53561 - protein, 1094 aa, Oryza sativa
MAHVMGVSLAGEETLGRTPGVHEVHLTEKKVILNHEVAEEEDNTTEWFLDTGATNHMTGSRSAFADLDTGVVGTVKFGDGSVVDIRGRGTVLFQCKNGDHRSLEAVYFIPKLCKNIISIGRLDARGYDAHIYHGVCTLRDPDGLLLAKVKRSPSFLYILKLNMARPICLAANGTETAWRWHARFGHLNFQALRRLAQAEMVRGLPVIDHVDQLCDGCLAGKQRRVPFPDKARFRAQDALELVHGDLCGPIAPATPGGRKYFLLLVDDMSRFMWIRLLSGKHEAAAAIKQFKAGVEMESGRKLRALRTDRGGEFTSVEFTEFCADRGVSRQLTAPYSPQQNGVVERRNLTVVAAARSMLKAAGMPAQFWGEAVMAAVYLWNRSPTKSLDGVTPYEAWHGRRPSVEHLKVFGCVGYVKTVKPNLRKLDDRGTRMVFIGYEQGSKAYRMYDPVSRRVYVSRDVVFDEAAMWPWRDPEVTQTGGEEDFTVEFFSTPLGGNRVPDVVVEHGGARETETAPSPLATPDAAPVWSPVTSSSPAGVEFCTPPSDASIESDGAPPRFRTVNNVLATTTPVLDFDYNDECLIAEQEPFSFKEAEKEQCWMKAMEEEMSSIEGNNTWFLCDLPSDHRAIGLKWVYKIKRSAEGEILKYKARLVAKGYVQQQGIDYEEVFAPVARMETVRLLVALAAHEGWQIHHMDVKSAFLNGELEEDVYVVQPPGFVVEHKENKVLKLKKALYGLKQAPRAWYAKLDSTLANLDFVRSATENAVYTRGEGNARLVVGVYVDDLIITGALGTEIAKFKEQMRSMFSMSNLGLLSYYLGMEVKQTEEGITMSQAGYAGRILEKAGMQGCNPCQVPMDARLKLKKGVEDCIDATQFRSIIGSLRYLVNTRPDLSYSVGYVSRYMENPGAEHWAAMKHILRYVAGSLNIGLKFRKGEEKFPRLVGYSDSDMAGDVDDRKSTTGVLFKLGENLITWQSQKQKIVALSSCEAEYIAATTAACQGIWLARLLGELQMKKPCCTMLKVDNKSAINLCKNPVLHDRSKHIDTRYHFIRERVERKEVEVEYTSSAEQLADILIKPLGKVRFLELRGKLGLSPV

SEQ ID NO: 53562 - protein, 109 aa, Oryza sativa
MLHHVIAGKELKCYFHSHPQIPNVPNWSVDGIISHAKVNHTKPTDQHQESRKAILKSHADLAFRQKNYDCAAKVYDLTRGPTAVLYANKSICRLLMGDGEGALSDGDAE

SEQ ID NO: 53563 - protein, 608 aa, Oryza sativa
MPELRSSTRQARLRSRKPDDQKPAEQAAKPALPAPQRAGKRVPPPAIRGRKGAAGRRGGAAPRGRRKAVEVVDLEAGQGRGDSPKPVVGQAVVGEAKNVKAPEVVANKGLRMDGESAEKLVAADDESSLPVPERIQVGNSPEYITDRKLGKGGFGQVYVGRRVSGGTNRTGPDAYEVALKLEHRNSKGCNYGAPYEWQVYHNLNGCYGIPAVHYKGRQGDYYILVMDMLGPSLWDVWNSLGQTMSPHMGACIAVEAISILEKLRSKGFVHGDVKPENFLLGQPGSPDEKKLYLIDLGLASKWRESSGQHVDYDQRPDIFRGTIRYASVHAHLGRTGSRRDDLESLAYTLIFLIRGRLPWQGYQGDTKSFLVCKKKMATSPEMLSCFCPPPFKQFLEVVTNMKFDEEPNYAKLISLFDSLIEVPASRPIRIDGALKVGQKRGRNHEEDEQPKKKVRLGSPAAQWISVYNARRAMKQRYHYNVADNRLQQHIEKGNEDGLYISCVASSANLWALIMDAGTGFLSQVHELSPVFLHKDWIMDQWEKNFYITAIAGSANGSSLVVMSKGTPYSQQSYKVSESFPFKWINKKWKEGFHVTSMATAGNRWGVVM

SEQ ID NO: 53564 - protein, 529 aa, Oryza sativa
MGSADLVLKAACEGCGSPSDLYGTSCKHTTLCSSCGKSMALSGARCLVCSAPITNLIREYNVRANATTDKSFSIGRFVTGLPPFSKKKSAENKWSLHKEGLQGRQIPENMREKYNRKPWILEDETGQYQYQGQMEGSQSSTATYYLLMMHGKEFHAYPAGSWYNFSKIAQYKQLTLEEAEEKMNKRKTSATGYERWMMKAATNGPAAFGSDVKKLEPTNGTEKENARPKKGKNNEEGNNSDKGEEDEEEEAARKNRLALNKKSMDDDEEGGKDLDFDLDDEIEKGDDWEHEETFTDDDEAVDIDPEERADLAPEIPAPPEIKQDDEENEEEGGLSKSGKELKKLLGKAAGLNESDADEDDEDDDQEDESSPVLAPKQKDQPKDEPVDNSPAKPTPSGHARGTPPASKSKQKRKSGGGDDSKASGGAASKKAKDTKPSVAKDETPSSSKPASKATAASKTSANVSPVTEDEIRTVLLAVAPVTTQDLVSRFKSRLRGPEDKNAFAEILKKISKIQKTNGHNYVVLRDDKK

SEQ ID NO: 53565 - protein, 557 aa, Oryza sativa
MERQTSFRLGALEKLKSFRGMEKQKSFKMMSTDNFRRHRDSPGKRGDTPLHLAARSGNAAGAQRIIAEFDPEVAAERAAQANHDGETPLYVAAERGHTDVVREILKVSDVQTAGVKANNSFDAFHIAAKQGHLEVLKELLQAFPALAMTTNSVNATALDTAAILGHTEIVNLLLESDANLARIARNNGKTVLHSAARLGHVEIVRSLLSRDPGIGLRTDKKGQTALHMASKGQNAEIVIELLKPDISVIHLEDNKGNRPLHVATRKANIVIVQTLLSVEGIEVNAVNRSGHTALAIAEQLNNEELVNILREAGGVTAKEQVHPPNPAKQLKQTVSDIRHDVQSQIKQTKQTKMQVQKIKKRLEKLHIGGLNNAINSNTVVAVLIATVAFAAIFTVPGNFVEDITQAPPGMSLGQAYVASNPAFLVFLVFDALALFISLAVVVVQTSLIVVEQKAKRRMVFVMNKLMWLACLFISVAFIALTYVVVGRDDWWLAWCTMAIGAVIMLTTLGSMCYCIIAHRMDERKIRKASTSQSRSWSQTVDSDPDLLNSEYKKMYAL

SEQ ID NO: 53566 - protein, 811 aa, Oryza sativa
MEGDEGAAAAARIRLVRCPKCDKFLPELPAYSVYVCGGCGAALQAKKKYSAQGSDNSDNGHVKYLEVLESVAEAPEAMDGATADGRSIPNRISALHSRSVYNHEDNRMARGPSTSTGEATIRNDGREAKYMRIRNVENADMMKSVRGRGISDISPRSPIDGIPPTSYQAESLVNYQLQSKYRFSNREHANDRDLDGPSRVRGLEKDRAELLKMLDELRDQVQQSCEVTDAPSRSATTNRPADASSSHGAHDQPNQLRHDPSVLHWNGSHHSPSLNVQSPNIPQVHAPLPTRQNLHGYAEPIPHARASSYHAGAGYPCRNVDNFFFGHHDPDPLLSCHHEGLYHQPVCSCFNCYHREFLPVQGTPLGFTDQRAPYLMNSYGAYPVEGPLYGQQRYTSRGTNTSLQRNHLRTNVRKKPAQTCEPIAGGAPFTICYNCYEVLRIPMKHSLLGKEYKLMCGSCSHAILVNLDGSRLNVSEPAPGINLSAALQNGIGDSMRNNGHANADERLLPQYCFSNGSHESQEKDLESNSSESDSKHTPLGTDSENTPQSRDLPSEANVISHVPSLPHHDRCGFSPSEDSGKGSRSTHSEHEKATLFTESCKRNSIKDVCVANETQSPVDEFDDTLYAQDMLNLPQNVGHTRSTKAGDSFLTNLIKRSFKMNNGTRNGRARIFVNGFPISDRAVRKAEKLAGEICPGDYWYDYRAGFWGVMGRPCLGMIPPYIPEFNYPMPKNCGGGNTGIFINGRELHQKDLDLLVSRGLSDSPGRSYIVENSGKVSDEVSGEELYGLGKLAPTVEKMRRGFGMRVPRIIQ

SEQ ID NO: 53567 - protein, 674 aa, Oryza sativa
MPPPAEEFAVDDLDEFESRLDSFLNRFHADDLRRILLPFPDGKLHFPLVIDFAELLEFDPEVAHQLYDYPKDVLELFDAAAQRALDKFDAAARRADKRKAGDETMEKKFVHVRVNTSGSALECPEASPSIGKVRVKHRGTLLTLKGTVIRSGGVKMIEGERKYQCRKCKCRFTVHPELEAGNRITLPASCKSKSAKGCGGANFQLIEDSITCHDYQEIKIQENIQLLGVGSIPRSMPIILMDDLVDIVKAGDDVVVTGRLSAKWSPDIKDVRSNLDPMLIANFVRRTNELKSDLDIPVEIINKFEEFWAASRATPLKGRNSILKGICPQIYGLFTVKLAVALTLIGGVQHVDASGTKVRGEPHMLLVGDPGTGKSQFLKFAAKLSNRSVITTGLGSTSAGLTVTAVKDGGEWMLEAGALVLADGGLCCIDEFDSMREHDRTTIHEAMEQQTISIAKAGLVTTLNTRTTVFGATNPKGQYDPNESLSVNTTLSGPLLSRFDIVLVLLDTKNKKWDKIVSSHILAENTEEKKGKTSDPEVMWTLSMLRRYIHYVKQHFKPVLTKEAERVISSYYQRQRQSGTRNAARTTVRMLESLIRLAQAHARLMFRNDVTKLDAIAAILCIESSMTTSAIVDTAGNALHSNFTENPDQECILKCDSIAYLSKNIKYLTDEISN

SEQ ID NO: 53568 - protein, 714 aa, Oryza sativa
MGAAPSTPRLGAVAGAAASPGAAEQMFAALVGGKAYPISSEFWRQLLELPLTQQWPRDRVLQACHAFAQNNYHTKHLAKILIHLVWCLQECMAESSHAAYRKAINAAYISSIFLKFIIENAKTDNWQELSLEIDKDEKGLENFPSEQSVEYFLMRGVLNYIGSVDVSLESCYLHHELLNLMLVLMSTQLCSGPSPEPKDVHPFIDAAMLQDSSIVSSVVQKLLLNFVKRPRIPLNSSHPAFSDDGGPGVLQRVGSVAANFVLLPYYTFNYLVSSNAEGASSQLADNSLLVLLILIHYRRCITMSESFPSSNVYTSDLNTNVKDAPAFHDDPYYKALSNAKDSQYDRADVEGNAQNGLVVRLSFASLFDALGTCLKDESSVLLLYSLVHGNCDFQEYVLVRTDLDTLLMPILEMLYNASRKTSNQIYMLLIVLLILSQDSTFNASVHKLVLPSVPWYHERLMHQTSLGSLMVVILIRTIKYNLSKLRDVYLHTNCLAILTNMAPHVHRLSAYASQRLVSLFDMLSRKYTKLAELKNDKAIKVISDQIEADNTSDDTSTELHIYTDFLRIVLEIINAILTYALPRNPEVVYAVLHRQEVFQPFKNHPRFNELLENIYTVLDFFNSRMDMQQLDGEWSVDKVLEVINKNCRSWRGEGMKMFTQLRFTYEQESHPEEFFIPYAWRVVLSRGFSFNPGAINLFPVEIHVDDEPSGEQKV

SEQ ID NO: 53569 - protein, 792 aa, Oryza sativa
MSSALEVEGSGSPGVEPAATATASRLKRHDSLFGDAEKVSGGKHHGGSAVSWAVTLHLAFQSVGIIYGDIGTSPLYVYSSTFPDGIGHRDDLVGVLSLILYTLIIIPMLKYVFIVLYANDNGDGGTFALYSLISRYAKIRMIPNQQAEDAMVSNYSIEAPSSQLRRAQWVKHKLESSRAAKMVLFFLTILGTSMVMGDGTLTPAISVLSAVSGIREKAPNLTQTQVVLISVAILFMLFSVQRFGTDKVGYTFAPIISVWFLLIAGIGLYNLVVHEITILKAFNPWYIVQYFRRNGKKGWVSLGGVVLCVTGTEGMFADLGHFNIRAVQISFNCILFPSVALCYIGQAAYLRKFPENVSDTFYKSIPGPLFWPTFIVAILAAIIASQAMLSGAFAILSKALSLGCLPRVRVIHTSKKYEGQVYIPEVNFMMGLASIIVTIAFRTTTSIGNAYGICVVTTFMVTTHLMTVVMLLIWKKHLVFILLFYCVFGFTEVVYLSSILSKFVDGGYLPFCFAMVLMTMMATWHYVHVRRYWYELDHIVPTAELASLLEENGGVRRVPGVGLLYTELVQGIPPLFPRLVRKIPSVHAVFVFISIKHLPIPHVAAAERFLFRQVGPRARRVFRCVARYGYTDALEEPREFAAFLVDGLKMFIQEESAFAPHQEMIDAAADDDDEAAARPRRSTSSAVHSEEAIQAASSGRTTASSVQLQAGGEPPAAMDVEEEKRLIDREVGRGVVYLMGEANVSAGPNSSILKRIAVNYIYTFLRKNLTEGHRALAIPNDQLLKVGITYEI

SEQ ID NO: 53570 - protein, 573 aa, Oryza sativa
MRLTVGQVHRHVLALASSRSCFVLGDHLPFRMLSLPRVVRFHQTAWHDIQTVEDKSGPLTLASLEVQNKVEYVKKERATRTGGIKPSSRASALNMKPKVSSFNAKPVKSALPKSAVLKKTLKIDESLFSAKSFEELGLPPLLIDRLNKEGLTAPTEVQSAAIPIISQKHDAVIQSYTGSGKTLAYLLPILSEIGPLKRPTEQDSSDKRSGVEAVIVAPSRELGMQIVREVEKILGPNDKRLVQQLVGGANRSRQEEALKKNKPIIVVGTPGRISEISAAGKLHTHSCRFLVLDEVDQLLSFNYREDMHRILEHVGRKSGTSSRDILGPLARRSERQTILVSATIPFSVIRAARSWGHDPVLVRAMSVVPLESITVPRPVLSQPDANSNSPSNSVNQAAVDSLPPSLEHYYCTSKAQHKVDTLRRCIHALEAQTVIAFMNNTKPLKDVVFKLEARGMKATELHGDLGKLARSTVLKKFKDGEFRVLVTNELSARGLDVPECDLVINLDLPTDSTHYAHRAGRTGRLGRKGTVVTICEETETFVVRKMRKQLAVPIKPCEFTEGKLLVHKEEDVE

SEQ ID NO: 53571 - protein, 265 aa, Oryza sativa; identical to SEQ ID NO: 30231

SEQ ID NO: 53572 - protein, 867 aa, Oryza sativa
MAASSSSSASASAMGGGGMRKAPSMEWRWVSTEEDDEGEEDGDTVEAAAAAVGAVGRGGSFGSEEEEDEEDGGGGGEGEGEGEDGEKQKLIRTVPSVDWFDVEGYEVSVAQHIEDSEEFDFGRTMFLALQTLAVVFGDIGISPLYTFDVMFSKYPILGEEDVLGALSLVLYTLISMPLVKYVLVVLWANDDGEGGIFALYSLICRNAKVSLIPNQVHSEKRMSSFRLKLPTPELERSIKVKEKLESSLLLKKLLLGLVLFGTAMFVSNGVITPAMSVLSAVSGLKVGIPNASQGLVVMISVVLLVILYSVQRYATSKMGFALGPSLLIWFCCLGGIGIYNLSTYGPAAFKAFNPLYIIYYFGRNPFQAWLSLAGCLLCATGSEAIFANLSYFPVRYVQSMFALLVLPCLVLANLGQGAFLIANQNSSEQIFFSSIPSGVFWPVFLIANLAALIASRTMTTAIFQCLKQSIALGCFPRLKIIHTSRKFMAKIYIPVVNWFLLFSCLGFILLFRSIYDVGNAYAIAELGVMIMATVYVTIIMLLIWETSIVKVLSFVITFLSLELVFFSSSLSSVGDGGWALIIFASGILMVMFIWNYGSKLKYDSEVKKKLSKDLMRKLGPNLGTIRAPGLGLVYSEIVKGVPAIFGHFLIALPAIHSIIVFVCIRNVPVPVVPQTERFLFQRVCTRGYHMFRCIARYGYKDKNQESQSTFERLLIEGLEKFIQREAVELSLQSGDDIDSDEEPPTPSRTIVAPNGSLYSLDVPLLADFVPSAEVIPEASCSTPQHDPVVDYTQNLELELAFIRQAKQSGAVYLIDNPIVKARKNSWFFKKLIINYFFAFLRNNCRRAMMSMSIPHTNVMQVRLTSYV

SEQ ID NO: 53573 - protein, 534 aa, Oryza sativa
MESNQHKASDPQDSMVHLDLDEDKIMVTSALPCPSMSVGKSVMRKRGRPSRHARGTSLSSVTPEGCKKMEGRSYNLRSDSTILLRNSCLLIADGSTKQKRSWGLDKDDLHIPFFQISDNPREAVDDILMTFGGLHRRIMQLIDVKMASKQLVFQALNLMRKVGYHVNKDKRVGEVPGVKIGDIFYSRIEMLLVGLHSNINRGIEFMSGAFINKEDKIATCIVSSGMYENGDDDPYTLVYNGQGKVHHKLERGNYSLNQSFIRRNHIRLIRSEPNPLVRLGSKEKIYIYDGLYKIEEKYRQTTKSRSNLKFNKLVRELGQPNGIVVWKNTQKWRENPSCRDHVIMPDMSNGAEIARVCVVNNIDSEDAPNNFTYSTKLDNGNHMVSANKMCVCKCTSSCLGEDNCSCLKTNGSYLPYNSSGILVCRKTMIYECNDSCACTINCSNRVVQRGSYLHFEVFKTMDRGWGLRSWDPIPAGAFVCEYVGVVIDKDSLVEEDEYIFEVTRPEHNLKWNYLPELIGEPSFYDMNDTFKKLC

SEQ ID NO: 53574 - protein, 660 aa, Oryza sativa; identical to SEQ ID NO: 44635

SEQ ID NO: 53575 - protein, 405 aa, Oryza sativa
MMVQMYAGGNYAGDDVLLINSVSSTSSMFILLVYFLHGREDIKYWILMILFALVVCCGMGWLVWHPNIIMSERTQDILKKSTKSAGITGIVLFGLVNFLPFFDLWTITKSNSTDFSLTTPIVINTMLAGVLSAFWALYAWIFDPKSPNYFMIANSLAAGMSSIQFVWLLVLRNSHREVNGQIVEVESLRCVLLSVAKSLERLGAAAPTEEFLQQTKYLLRLQEGLSIGLQSLDLMESAFLRLEQELVKNVARTANHVLEMQDKQDAAANFVARSDDNNANDVLRACRILREGCTTNKNAFDSMQEAIQHKIANAEGGENNLKDRINAAAAAIRGLAISMGYNMQTINGRGIPPTVKIAFNFCCEQILSVKTCADAPFVWLGFGGFSLRRRLNLRFDNVNWPDVPL

SEQ ID NO: 53576 - protein, 845 aa, Oryza sativa
MSVVGFDLGNESCIVAVARQRGIDVVLNEESKRETPAIVCFGDKQRFIGTAGAASSTMNPKNSVSQIKRLLGRKYSDPELQRDIAAFPFRVSEGPDGFPLVHARYLGEERVFTPTQLMAMVLSNLKGIAESNLNTAVVDCCIGIPVYFTDLQRRAVLDAATIAGLCPLRLFHETTATALAYGIYKTDLPENDQLNVAFVDVGHASMQVCIAGYKKGQLKILSHAYDRSLGGRDFDEVLFKHFAAKFKDEYKIDVYQNARACIRLRVACEKLKKVLSANPESPMHIECLMDEKDVRGFIKREEFEKISASILERVKGPLEKALAEAGLTTENVHFVEDVGSGSRVPAIIKILTDFFGKEPRRTMNASECVARGCALECAILSPTFKVREFQVNDGFPFSIAMSWKPDSQNGDNQQTVVFPKGNPLPSVKALTFYRSNTFQVDVTYVDTGDLQISPKISTYTVGPFNPGKGDKAKLKVKVRLNIHGVVTVESATMLEEEEVEVPVAATTEPPKDSAKMETDDAPNEAASGTDVNMQEAKAPADAAADGAENGAPNSEEKSVPMETDAKVEPSKKKVKKTNVPVAELVYGALGTTELQKAVEKEYEMALQDRVMEETKDKKNAVESYVYDMRNKLYDKYNDFVTAEDKEAFIAKLQEVEDWLYEDGEDETKGVYVAKLEELKKVGGPIEARYKEWMDRGPSIDQLAYCINSFRDAALSKDPKFDHIEMEEKQKVINQCSEAEVWLREKIQQQDALPKHANPVLLSSDLKKKAETVDRFCKPIMMKPKPAPKPQTPPQTPPTETPAGGAQTPEQQPQGAEAAGEASEGGASESTGEQMETDKPEGTEAA

SEQ ID NO: 53577 - protein, 630 aa, Oryza sativa
MFDAGDRGGGGGVVAVKRMKLCEEEEEEEEGMEVDEEEEEVGWVWRPPGGLAGEDEAAAWEGRAAAIAVSDAVEVDFPVIYVNAAFEAATGYRADEVLGRNCRFLQFRDPRAQRRHPLVDPMVVSEIRRWLNEGIEFQGELLNFRKDGAPLYSRLRLIPMHGDDGFVTHVIGIQLFSEANIDLSNVSYPVYKQQSNHRPNIQEINPASHEHIPKIQSSEYCCILQLSDEVLAHNILSRLSPRDVASIGSVCTRMHELTKNDHLRKMVCQNAWGRDVTVRLEMSTKMLGWGRLARELTTLEAASWRKFTVGGRVEPSRCNFSACAVGNRLVLFGGEGVNMQPMDDTFVLNLESAKPEWRRVKVSASPPGRWGHTLSWLNGSWLVVFGGCGQQGLLNDVFVLDLDAKQPTWREVASEGPPLPRSWHSSCTLDGSKLVVSGGCTESGVLLSDTFLLDLTKEKPAWKEIPTSWSPPSRLGHTLSVFGKTKLFMFGGLAKSGSLRLRSCDAYTMDAGEDSPQWRQLATTGFPSIGPPPRLDHVAVSLPCGRIIIFGGSIAGLHSPSQLFLLDPAEEKPTWRILNVPGQPPKFAWGHSTCVVGGTRVLVLGGHTGEEWILNELHELCLASRPDEDE

SEQ ID NO: 53578 - protein, 605 aa, Oryza sativa
MELALVGNPSNGVAKPSCNSVGSLPVVSSNAVINPPVTSAAGATLGRHLARRLVQIGATDVFAVPGDFNLTLLDYLIAEPGLKLIGCCNELNAGYAADGYARARGVGACAVTFTVGGLSVLNAIAGAYSENLPVICIVGGPNSNDYGTNRILHHTIGLPDFSQELRCFQTITCYQAVINNLDDAHEQIDTAIATALRESKPVYISVGCNLAGLSHPTFSREPVPLFISPRLSNKANLEYAVEAAADFLNKAVKPVMVGGPKIRVAKAKKAFAGIAESSGYPFAVMPSAKGLVPEHHPRFIGTYWGAVSTTFCAEIVESADAYLFAGPIFNDYSSVGYSLLLKREKAVIVQPDRVVVGNGPAFGCILMTEFLDALAKRLDRNTTAYDNYRRIFIPDREPPNGQPDEPLRVNILFKHIKEMLSGDTAVIAETGDSWFNCQKLRLPEGCGYEFQMQYGSIGWSVGATLGYAQAAKDKRVISCIGDGSFQMTAQDVSTMLRCGQKSIIFLINNGGYTIEVEIHDGPYNVIKNWDYTGLIDAIHNSDGNCWTKKVRTEEELIEAIATATGAKKDCLCFIEIIVHKDDTSKELLEWGSRVSAANSRPPNPQ

SEQ ID NO: 53579 - protein, 579 aa, Oryza sativa
MDVLKSDVKKTGILNETLRPPLVPSEKHNASPVNRGRDVASRYKNGLSAHSAATTARRCTSPSPGRTSANECTPEPKRAQSADRRRPSTPSSRVSTPSTPASRSVTPVRNTVTEGHKSSRRITSTRNTDGLWPAMRNLSSSFQSESVVTPGNKKDKVVPSGSLDQTKGQASVIAERKRSPLRRKNIGEQCENAQPSEDQPRRVIEQHRWPAMQSGRVASNILSRSIDMSDKAGRSVPSTNISRGVSPRKTLASEGTGKGFNKSLDEVARRLAIHAGGRDDKVDSRCHAYSQSTERCKSVSRPSRAVTLPVPVLHRSSSPSKASSVTSSISRSFQSPSRTRPSTPSRSQSAGSIQSGVASPIISYMVDAKKGKKNSSQIENIHQLHLSYNRYLQWIFVNAYAEDTMSFQKVTAESIIYNVLRNTSNLRDVVNMRRIMVQCIQQELKLHGILKEQIDYLEQWPALEKENSISLFHATEALKASTLRLPVTSGAKADVVALKNAVSSAVDIMQGLGSAVRCMLPKVEDRTYLVSELSVIARQEKAMLDECRELLAMAAKLQVQESSLRTHLTQLRPGIAHMI

SEQ ID NO: 53580 - protein, 860 aa, Oryza sativa
MSASEFRIPYQQVSSSQTAENAGQYKICRCGEGDPNTSETGDSSPTSCPNCQVLKSGHLLLSSKGIGWTTWKKRWFILTRASLVFFRSDPNAPVRGNEPVVTLGGIDLNNTGSVVVKEDRKLLTVLFPDSRDGRTFTLKAETTEELNEWKSALENALAQAPAVANAVGQNPIFSTDIAEPAEAPAEQPDDKSVIGRPAEFALVDADGSPSFLEKALKFIEDYGVKVEGILRQSADVEEVKRRVQDYEKGKNEFSPEEDAHVIGDCIKYVLREMPSSPVPAPCCTALVGAYRTDKTKRLDAMSKVIYEVFPEPNQQLLQRILKMMQIVGSHKAVNRMSPSALAACMAPLLLRPLLLGECEIDSDFSMAGDGSFQLLQAAAAANHAQAIVIIMLEEYDEIFDDLEDGSCSSDAYTDSEDGDVDKEYSTDNDVDGSYDSGEDNIEEDMEDDTEYSSGGSECDDKVKRNNSGKASNVENTSQMESNDPSHRKLHESNGSTDQIEKSNVRASSSRAKFMEKSSSRNKSKKTLLGRASARRDLSADETDFCSDDETLIEKLENNKTDLQSKITKEVKENSILQASLGRRKEELHERRLALEKEVENLRDQLQKERKLRASLESGLMNLRRGQVSFPSTIDSKTKADLEEVATAEADILNLKQKVSDLRGQLNNNVQMSSTSLCDSCNKRLLSTDKLFEDEQNTSPSNVGPNSMSDMASATDMADIEQSRKQTTQHSSSSIDKPTLHKHQKSIASNEQSSTISQRAQRILSSKGGIMKDGQDGSFTSKWNLAQKQYSNNPLLGRLGSNAYSSTRTEESGAVPFALAKLTNRLNFLKERRAILASEMQNLNLARPPGPTAPAPKKDST

SEQ ID NO: 53581 - protein, 105 aa, Oryza sativa
MVAALPSSPILPAQKATVAVLRWSGGGGVSAERRWRRRFGGCRRRDVPVCGGLMPRMAPAELKPTTRSGSTPRRAPVWCGPLRQASPDPVSYAPKVFRVCTDLGF

SEQ ID NO: 53582 - protein, 211 aa, Oryza sativa; identical to SEQ ID NO: 30980

SEQ ID NO: 53583 - protein, 420 aa, Oryza sativa
MPRTARKARVLLLSSPPPPPSPPVMLRRGGVVLLLVVVVLGLLAARCDGKKVSSFVGTYGVNYGRIADNLPPPTEVVKLLRMARIKNVKIYDADHTVLDAFRGSGLNLVIAVTNGEVKDIAASPAKAMDWLNENVQPYYPSTRIVGITVGNEVLGGADAGLAEALIGAVVNIHDALKMLGLATKIELTTPHSEAVFANSYPPSACVFRDDLMVYLKPLLDFFSKTGAPFYVNAYPFLAYMSDPAHIDVNYALFKPNAGIYDAKTRLRYDNMFEAQVDAAYFALEAAGYPEMEVRVAETGWASAGDATEAGADPANARAYNFNLRKRLFLRKGTPYRPGRVAKALFNENLKPGPTTERHYGLFKPDGSVSIDLGFKGLVPSSSLPSSSIISFKRARERGWMALVQYSATLLSCTFIFLVLS

SEQ ID NO: 53584 - protein, 584 aa, Oryza sativa
MMSNGHSNSSKSLERFISRRALQMGSSAPCKTWALGFFCGVCIVYLFGVALPPIQILMIRSVHPPVRRAILLNSTSTEPGGATETDDLSVLQEKIEIATNSKDINEADKMHLYNAWSTLLDTTSDEVMKSSDVPRPPHLENCRLKWERNKKFDSYSDNGVFPPWTLWKGSLGLELFNQNYSDSEEWRQMFFRSNAKSDRAPYPPWIAGSDEENYPLTRQVQRDVWIHQHPPNCSDPSLRFLYADWERLPGFGIGAQLAGMSGLLAIAIKERRILVAGYYNRADHNGCKGLARSSWSCYFLPETSADCQKRALDLMQSKDSRENGIIKVKENYTSKQIWAGHIPRIWGRPWKYMQPTTEIDGRLVKNHCKMDRRWWIAQALRYLMRFQSEYMCRLLNVARHSAFGMQAAKMVLENVPDPPKPSISRTESDIERLVWSEHKPYIPGPLISMHVRMGDKACEMEVVGFEKYMELAGRLRKRFPSLKNIWLSTEMQEVIDETKLYPKWNFYFTNVTRQDVNVSMAMYEASLGRETSTNYPLVNFIMATEADFFIGALGSTWCYLIDGMRNTAGKVMSGYLSVNKDRFW

SEQ ID NO: 53585 - protein, 361 aa, Oryza sativa
MVLQKRLDYGSHGHRAPIKPRVATLAPVKRSTRIRKKQMYALDLLATAAEKLLADQDNLSSGPNINETPEGYVTSMKPVKAEQFDEAFPLRSVAVKKDDCKGCTVGCAGICGFLRQANMCLAENSSTQNLADSVLESLTAKPDVLAKDSFVSSKKSCRLGFGLGTIPEYGSVGVCQPWSTRSAEVKQVHRARPTAIRSQEDSDAAALCALVETMDLDTKPLAEASSGSNSGVHICGPDRGHNSHPSCLAKVQHAADRDDDENSSGCVHPSTSGNNRGYIPHYIGDRRIRRLFASRLRKAARNRICGEMSCKGNKLSLCEKKMPTTRRRVQQTTLKRKRLAQLYSEKSSDEENCVRCCYYYN

SEQ ID NO: 53586 - protein, 276 aa, Oryza sativa
MHTRDMKNAYKQADGRKVDNRRVLVDVERGRTVPNWRPRRLGGGLGSSRIGGENAEQKLSTRDQQHAGRPRSEEPRRDERRADRDREKSRERPRERDRDERTRERSHDRTRERDSKEDRHHHRDRDRTRDRERGRDRERDHGRDRDRERDRRDRDRDRDRGRDYERDRDRGHDRHRERGRDRERDYERASHERDRGHMHERDAEFANGEPKHDQEYGYNYEQHKSHDAYETERSKRHEHEYYQMQPNNTEPEGPEEGEAYDEGDYQYHQAADEHNN

SEQ ID NO: 53587 - protein, 334 aa, Oryza sativa
MSPPPPPPPPRVVICVGDVHGYISKLESLWANLQSALPPDAFATALVVFLGDYCDRGPSTREVIDFLLALPSRHPAQRHAFLCGNHDLAFAAFVGALPPPPDGTPFSSTWGEYIQNEENEGWYRGPGHEGMHCQGRRWGGIMKEKRNPKRGSSYMGSIYDARPTFESYGVAHGSPDLVKAVPEEHKKFLRELVWIHEEENVPIDTNEGQIICKLIAVHAGLERSIDLNEQFRILRTKDTKISKVAMLSGRQDVWNIPKDLAGKQTIVVSGHHGKLHIDGLRFVIDEGGGYADRPIAAIVFPSKELIRSTEGTSSQNRSRYHQECPDTALQVIPY

SEQ ID NO: 53588 - protein, 1035 aa, Oryza sativa
MTDTTDDIAEGISFQAFEDDCRLLGSLLHDVLLRELGPRFIHLLERITILAQSAVNMRSAGVEDTAVVVEKQLGAELAAMSLEDSLCLARAFSHHLNLMTIADTYHRVRKARNFADLSKSCDDTFAKLIQSGVSPEELYDTVCKQEVEIVLTAHPTQINRRTLQYKHLRIAHLLEFNERADLSLEDKEILIEDLVREITAIWQTDELRRHKPTPVDEARAGLHIVEQSLWKAIPHYLRRVSNALKKNTGKPLPLTCTPIKFGSWMGGDRDGNPNVTAKVTRDVSILSQWMAIDLYIRELDTLSFELSINRCSEKLANLANDILLKESASEDQKTNTWNQTGPQNNLKLQHSLALPAQLPSGADLPSCTECNDGESQIRMSKLPGNPKHKLALNITEKREDSPLPSPSHRPMGRTPSGDQLRKMFTESQIGRSSFRKLLEPSISERPGSTPYRVVLGDVKEKLMNTRRRLELLLEDLPCDRDTSEYYDTSDKLLEPLLLCYQSLQSCGSSVLADGRLADLIRRVATFGMVLMKLDVRQESGRHTETLDAITSYLDLGVYSEWDEQKKLDFLTRELKGKRPLVPPYIQVTADVQEVLDTFRVAAELGSDALGAYVISMASNASDVLAVELLQKDARLTVSGDLGRPCPGGTLRVVPLFETVNDLREAGPAIRKLLSIDWYRDHIIKNHNGHQEVMVGYSDSGKDAGRFTAAWELYKAQEDVVAACNAFGIKVTLFHGRGGSIGRGGGPTYLAIQSQPPGSVMGTLRSTEQGEMVQAKFGLPQTSVRQLEIYTTAVLLATLRPPQPPRDDKWRGVMEEISRVSCAQYRSTVYENPEFIKYFQEATPQAELGYLNIGSRPAKRRTTPGISNLRAIPWVFAWTQTRLVLPAWLGVGRGLQDACDKGHTHELRAMYEEWPFFQSTVDLIEMVVAKADAPMAKHYDDVLVHDAGRRTLGAELRQELARTENCVLAVSGHKKLSANNRSLRKLIDSRLTYLNPMNMLQVEVLRRLRQDDDNRKLRDALLITINGIAAGMRNTG

SEQ ID NO: 53589 - protein, 341 aa, Oryza sativa
MGPRGSALICGYTTYHKLVEESLAELKKKEDCLLCPTGFSANMAVMTALGSVSSILSVGRKPAEGERIAVFSDALNHASIIDGIRLVERQQEVVAFVYKHCDMHHLDFLLSSCSIEKKVVVTDSLFSMDGDFAPLPELVKLRRKYGFLLVIDDAHGTLVCGENGGGAPELFGCENDIDISVGTLSKAAGCQGGFIVCSNRWKRLIQSRGRSFIFSTALPVPVVASVYAALHVSKKERWRRSVIWRHVQYFASLTKLDLTSPIISIVVGSEEAALRAGRHMLRSGFHVTPIRPPTVPQNSCRLRITLSASHSLDDIKRLVDALSPWLPDKHDEQTYVMASKL

SEQ ID NO: 53590 - protein, 589 aa, Oryza sativa
MESAEAEPTNKSVIQGTHELTVCQTTERLDTWKLNEQQQQLVDASGLGNLIHTAGLVIDRIALMAFFELWSKETNTAQLNGFEMAPSLRDAAYILGIPVTGRVVTTGAVLNKSVEDLCFQYLGQVPDCRDCRGSHVKLSWLQSKFSRIPERPTNDQTMYGTRAYLLFLIGSALLPERDRGYVSPKYLPLLSDFDKVQEYAWGAAALAHLYKALSIAVAHSARKRLFGSAALLMGWIYEYIPALRPDMYDPPEHIFPRVLKWTGSTISQPAKNVSDIRKAFGLLQVSDVNWEPYKGVDPASIPKHCAAPDNLCFSRTWLVSFNLKEIYAPDRFARQFGQEQHRPLNDVPAFQRQLWNPAVDWSLMYASEIERFQQLINAADGGDHGHTADAAAAAAADVFTPATMARASLGLSLISVVEGVREELPTVARFLEQHRLPAELATSLSRIRGLIEASPPAPPLKRGDAAPQPQPQVIAVIPPLAVMPPREQEAPHGTGDAEAPGIVRGDADDDDAVPPKERSDEQQQQDEEEEEEEEQKWRRRRRREEEDGAAKGSGGGGGAVRRSSRSCVQAKRFRRVGGKGSQSSDPIVL

SEQ ID NO: 53591 - protein, 650 aa, Oryza sativa
MAAGGKGWVERARRGVKTAWFMVAMVASLLMASAPALVAAGDVAVALWLEVRLGCLRCHGLRGHLERYGFRSSLVDIPLVSIARSVVITCVYLMSDASGLSHGPYLGTATCCSLASLLILLIKASVYSPAQEIGPELSPSLADHKLSLKKLSGMPVLFLSSLVFALGHVVVAYRTSCRARRKLLIHGIDPESILAYKNAYPGCYKTPRSPTPYSGKFYSRSDSETKRKSVAHDDRDIPISFLADGDSMFIACQGITVHYKLSDPSSCISSATDTFPEIHHDVISASISPRRQRHDSPPSASTNTRRLLNRSFSHQYHQTSLYAPLLVEPVTSPTLSDDTPVLSVDDGSADVCLKPMGFDLEAGEQGKFAVVLVHGFGGGVFSWRHVTNLLSRQVGCTVLAFDRPGWGLTSRPRRKDWEDKNLPNPYELGSQVDLLISFCSDMGLRSVVLVGHDDGGLLALKAAEKLRASGDSRKVEVKGVVLIGVSLSREVIPAFARILLHTPLRKKHMVRPLLRTEITQVINRRAWFDATKLTTDVLNLYKAPLFVEGWDEALHEVGRLSFSTVLSSKRAADLLRSVEDLPVLVVAGSEDALVSSKSTQVMASRLVNSRLVTISNCGHLPHEECPKALLSALSPFISGLVSSDDSLQRL

SEQ ID NO: 53592 - protein, 118 aa, Oryza sativa
MASRWIRPEVYPLFATTGVAVGICAMQLVRNITTNPEVRVTKENRAAGVLENFDEGKRYSQHGVRRFWLSKRRDYMQALDNPTNPSTKKIDAKVILIRWVHIYIYIDLILGFKMPIYK

SEQ ID NO: 53593 - protein, 106 aa, Oryza sativa
MITFWIFCIAFYAWSYQLQKGNEGETWIGSRDKTCESFKRCWRRTWACTEAQPAETGDRRKCLHISSSTKRSWITGKMHIHVERAASTRPCHILDPFTIYVWEELV

SEQ ID NO: 53594 - protein, 589 aa, Oryza sativa; identical to SEQ ID NO: 44306

SEQ ID NO: 53595 - protein, 377 aa, Oryza sativa
MDPCPFVRVLVGNLALRMPVAPPAAGAGAGVHPSTAPCYCKIRLGRMPWQVAAAPLVVADGGEQAPSGALAAAFHLSKADLEWFARKPSLLFSSSSSSRGPATLKVAVYAGRKGTTCGVSSGRLIGKATIPVDLKGAEAKAAVVHSGWICVGKKSGGKGGSAAAELSLTVRAEPDPRFVFEFDGEPECSPQVLQVRGSMKQPMFTCKFGCRSNSDLRRSVVQTERDAAAAAGKERKGWSVTVHDLSGSPVALASMVTPFVASPGTDRVSRSNPGAWLILRPAGDGSWEPWGRLECWRERGGAGASNSLGYRFDLLLPGVDHAVPLAESSIAASKGGKFAIDLTSMQPQSRGGTRGAARGAAATSASGRSPATTTAAS

SEQ ID NO: 53596 - protein, 825 aa, Oryza sativa
MSLAPPAARVHLQEVAVNVNKSLFCFDHDSGATSSGVFAGDDPLKFYFPLFLYHVCTVFALSRAINALLRRANVPLVISQILAGTLLGPSFLGHIAPRVGELFATPEGWVLINTIGGYAFTLHIFVIGVKTDLGMIRKSGNKAIAIAVLGTASPHLAMYITGLALKARVPAAWAASFLLTNLNSWWSLSAFIVVCCTLHDLNLLSSKLGRLAMSAALIGDFANTFAIAGVTSYLLAASPSEKLQRIGIASVIAFTTFIAFMALVARPAILRLIRDVPEGALLTEARLIAVLLICLTCSFTGELLGLHATYGPFMLGLMLPGGAPLGVTMAERLDRLVAGVLMPLLFAQGGMRLNVKKITDASTCALLETFLVVGVVSKFVASIMPCLYFRMPVRDAVVVGLMMNFKGITEVVYASAFEDAQVLDEQVYAAFMINVLLIGAASASAVKYMYHPEEKYVAYRRRTVEHKKLGEELRVVACIHSQDDVGPMLALLDASSPTPMSPLSVYLLHLMPLAGLTSSVLRHFKHGKRNCVPSGTTDSERVVNAFQFFVQQRPPGAASLVPYVCIAPYATMHDDVCAVALEKRAMLIVVPFHKRLAIDGSVEPTSHNAGAIQAANTNILNYSPCSVAILVDRGSLSTVAAAAAAADGFPHRVALYFLGGPDDREALALAATMAEDATIGLTVFRFMLPADRQSRGGEGDGEEDRRDEAELQEFVRRWVDDHRVAYSENMVGGSDEMVDVIRKTSPAFNLLVVGRRSESPESPLTAGISDWSEHLELGVLGDLLTSTDFGCRVSTLVVQQQTMAAAGESCRLPELPAKHKSDEPV

SEQ ID NO: 53597 - protein, 197 aa, Oryza sativa
MEAAAARPVIRVAAICGSLRKASYNGGLLRAAAGVCEESIPGLRVDHVHISGLPLLNTDLETADGGFPPAVEAFRDKVRQADCFLFGSPEYNYSIATPLKNALDWASRGQNCWADKPAAIVSAGGGFGGGRSQYHLRQVGVFLDLHFINKPELAVKAFEQPPKFDSDGNLIDAQIRERIKQVLLPLQAFTLRLQKKD

SEQ ID NO: 53598 - protein, 600 aa, Oryza sativa
MEIGAVENGGVVGGEVVAGKRGKTPQGWKCMPFIIATETFEKVATIGVVANLTVYLVKRFNIGQIEAANITNIFFGTLNFAPLLGAFISDVYLGRFKTLAYGCFASLLGMLGMTLYASLPALKPPICHEKTRLGGGCNSPSTLQLSVLYLSLGFLIIGGGAIRPCSLPFGVDQFDKTDEEGRKGLNSYYNWYYGTSTAALVLSMIVIIYIQNNVSWPIGFGIPTLLMFLAIIMLFLGTNLYVHVQPEGSIFAGIAQVLVASFKKRNLKLPCPHDINQQGLMLYNPPSKGNRVFRLPLTSQFRFLNKGAIVMGDDINVDGSARNSWELCNVQQIEEVKCLIRIVPVCISGVLCFVALAQQFTYIILQTFTMDCHFGTHFEIPAGSVVSISLIALTLFIPIYDRILVPIARGFTGVESGITLLQRQGIGLAISPISMVVAGLVERKRRNSALSNGGISPMSVLWLAPQLVLMGIAEAFNAVGQIEFYNKQFPENMQTLAGSLFFCTIAGANYLSTALANIMRKVTTRDGHSSWLTDNINLGKLDYYFYFIALMGVLNLIYFLICSHFYQYKVMSLHSEESIKIPTKEEEATEIDIDTDAPSK

SEQ ID NO: 53599 - protein, 399 aa, Oryza sativa
MALSSMQNVRGGVTWYKGLQPLMNHARTKGSKRVKLHRELAALLEEELYRTGISMASSGEFFGIWKGLRENTDRPIVWPPVVIIMNTRLEQDKDGKWKGMGNKELLSYFSKYHVKEACHAYGPDGHSGMSALIFEGSAVAYKEAERLHNHFVDQRTDKYAWLNHRIVIPGGKRQLYGFLAEKEDLEAFNRHHGKDYLKYEMKSYNEMVVTQLKQMSEDNQQLNYVKNEMVKTERHSKEVEEALGVETQKLQGAIEDNIILKRKTKEMLSECVEQMEFNAKFYHEQIERLRKDTEEKENEFERLLQEELARAIECDVDSETTENCKLREEQIQRIIDCQVKDAEEFDAEQDELIKTHEEKKANVKMEYMAKDVELEEELYAALTSLMEKHKPDIFQPSSP

SEQ ID NO: 53600 - protein, 839 aa, Oryza sativa
MRASPMAGASHHLVVFLAALLALLPGSSQLQYSQTWTLFKIQQMLNHPPVLSHWRRTTDFCGGGGTAAPSAAVVCYGDTVTQLHIAGVRGAPPLPMNFSIGALVMALSRLPDLKVLTLSGLGLWGPLPDKIGRLAALEIVNMSGNYLYGGVPGGLSQLTGLQTLILDDNLLAGELPAWIGELPQLAVLSLRNNSLGGAVPASVGRMESLRSLVLASNNLTGNLPDMSGLTNLQVIDVGDNWLGPAFPALGRKVVTVVLSRNRFTGGLPGEITSFYLLERLDVSWNRFVGPFMPALLSLPAIRYLNVAGNRFTGVLSDKVACGDNLQFVDLSSNLLTGSEPACLRPDKKPATVVLVNANCLEATGGDASQHPSPFCQNQALAVGITHGGKVRKKLTHHAGFLAGIAMAALAAASAIAVVAVVAVRRKNKKGVMVRPPAMLGEDNSSSTSGYPSKMFADARYISQTVKLGALGIPPYRTFSLVELEAATDNFENSLLLGQDSFGEMYRGRLGNGTLVAIRSLKVKRNQSSLSFSRHIETISRLRHRNLVSALGHCFEYDLDDSTVTQLYLVFEYVQNGNLRSRISQGTEGRKLTWAQRISAAIGIANGIQFLHAGMMPGLFGNNLKINNILLDQNHVAKISSYNIPILGEAMKSEKGGPGGKHHTESPLLNDKTDIFDFGVILLEIVSGKPITSLYEVEIMKELMLWAVADEDLVRRRSFADQEVSKGCSDESLRTIMQICLRCLAKEAVQRPSIEDVLWNLQFAAQVQDDWEGDNRSSDGSMVSSSSRITKSSRFQNEQTRSGREKECEDSSARGSVWLQAATEDGNFETGRRQAEDERY

SEQ ID NO: 53601 - protein, 308 aa, Oryza sativa
MVRRHLLRGHSLDRFLPIRSLIMSSSSSFSSSSPSPPPPSSSSSRGSSSGRWCGVSVAEEDEDDAAVSATTTPPLPPLQKRVLSRSHGSKAKPLGGSVDHLPPVVPPSSKNVRDSGPPSEIDLVKEKFAKLLLGEDMSGTGKGVSSALALSNAITNLAASVFGEQRRLEPMSADRRARWNKEIDWLLSVTDHIVEFVPSQQASTDGTSMEVMGTQQRRDLLINIPALRKLDAMLLEYLDNFKDEQEFWYVKKDADEGEKGDAPRQGDKWWIPTVRVPPEGLPDASKKMDSAPERPCRAGAEGSHGYQC

SEQ ID NO: 53602 - protein, 605 aa, Oryza sativa
MAALPAYLLLLLLILVILRPAAAPGAASQPPTSEPHLPPPLLAQKVQVWPKPTSISWPSAVYAPLSPSFSVRAVLSHPSLRQAVAFYTRLIRAERHAPLVPPANYTLSRVPVRTLTLSVSDPDVPLGPAVDESYTLSVLPDSGSADISAATPWGAIRGLETFSQLAWAGGGAASGGQPIVPSGIEISDRPHFTHRGILLDTARNFYPVRDILHTLRAMAFNKLNVFHWHITDAQSFPIVLPTVPNLANSGSYSPTMRYTENDVRHIVSFAASFGIRVIPEIDMPGHTGSWAGAYPEIVTCANRFWAPHAEPALAAEPGTGQLNPLNPKTYRVAQDVLRDMVALFPDPYLHGGADEVNTACWEDDPVVRRFLAEGGTHDHLLELFINATRPFVAQELNRTVVYWEDVLLGPKVTVGPTILPRETTILQTWNDGPENTKRVVAAGYRAIVSSASYYYLDCGHGGWVGNDSRYDKQEKEREGTPLFNDPGGTGGSWCAPFKTWQRVYDYDILHGLTDDEAQLVLGGEVALWSEQSDETVLDARLWPRAAAAAETLWSGNKGSNGKKRYANATDRLNDWRHRMVERGIRAEPIQPLWCSLHPGMCNLSQ

SEQ ID NO: 53603 - protein, 481 aa, Oryza sativa
MLPYFDPEYENFSQRINPPRVCIDNSTCSDCTLVKVDSMNKNGILLEVVQVLSDLDLAISKAYITSDGGWFMDVFHVVDKQGQKVTDEKTIKHIEKALGPDSNLLGGAKGGSSPVRSVGMHSIGDHTAIELKGPDRTGLLSEVFAVLAELGCNVLAAEVWTHRARVACVVYVNDVASGQAVGDPCRLSRIEHRLRLVLRGHAGGDDGDGDDGPAHANFFSSGGAGSNTHVDRRLHQLMHADVDADDDDGLDSRAIVSGEAGNAAAAEERPVVTVEHCEEKDYSVVNVKCRDRSKLLFDIVCTLTDMHYVVSHASVSSDGIYGIQELYIRRKDGRTLQKDEAGRVIKCLEAAISRRVSEGFTLELCGRDRVGLLSDVTRVLREHGLTVTRADVTTVGGQAINVFYVRDASGEPVDMKTIEGLRVQVGHTVMLNVKKVPSSPSSSSAAAAAAANSKSPGQPASGALSRTSFFSFGNLFAKLRA

SEQ ID NO: 53604 - protein, 736 aa, Oryza sativa
MREWMTEFRAFLTTSYPPAIEADGAPDALRAAVCDNLQLYMEKYEEEFRGYLKEFVEAVWGLLMAPSVSPSRGQLAVTAIRFLTTVAESVHHALFGSPDAMKQICDSVVIPNLRLRDDDEELFEGNWVEYVRRDAEGSDADTLRRAACRLLRGLAANYREQVAALVSAQVQQMLAAYAADRTNNWKEKDAAIYLVISLMQKPGATGGGTPVVDMESFFTSVIVPELQAPDWESEPMLKATVLRFLKEFKDQIPKATALALLPSVIRFLIHESNVVHSYAATFIENLLIIKDMVPVPSANVITRAPRYVAADINPYAQPIVQNLSKALSFPESYENPYLMKCLMRVLGIANIAGQIVHEITARLVGILMEVCNNPKNPDFNHYLFEALAAVIGRAGEQDPALLPVFEASLFPVLQRILVEDISEFWPYAFQIFAQLVNLSRPPLSQNYMQLFGVLLSNATWDRPPCVPALVRLLRAFLRKIPNELNQEGRLPNILVIFRSLLSRSSTEDSAFYMLNTLVENVSFDIMNPHINEIWSALFTRLQTRQAVKFVNSLVVFMSLVVVKYGPGVLVSSVDAIQPNIFMTILQRFWIPNLKFIKGTVEVKLTSVASTKLICESALLLDGAAAQTWGKLLDSIVALLSRTDQDGAQQDQNDGADADSQRTSGYSVSFVRLQYAGKSEDDLLKEVNDPKQFLVTSLATLSAQSPGRFGPIIEQNVDPANKGALIQLCAAYNTNIV

SEQ ID NO: 53605 - protein, 206 aa, Oryza sativa
MGWKGILGFDHGVVQAPLGPDISGPELAAAVANAGGIGLLRLPDWPAPDRVRDLIRRTRSLTERPFGAAIVLAFPHEENLRVVLEEKLAVLQVYWGEFPRERVDEAHLAGVKVLHQVGSFEEAAKAKEAGVDGIIVQGCEAGGHVIGQEGLLPLLPRVVDLVSDTDISVIAAGGIVDGRGYAAALALGAQGVCLGTSSMNIQVLDH

SEQ ID NO: 53606 - protein, 1052 aa, Oryza sativa
MRPETRLDSAVFQLTPTRTRCDLVVIANGRKEKIASGLLNPFVAHLKVAQQQIAKGGYSITLEVDPEIDAPWFTRGTVERFVRFVSTPEVLERVTTIESEILQIEDAITGQGGDNLGLRSVEDYNEKLAECIGGSKTNYDLDGDKSLILYKPGIQPPPPVQNDNATQEENSKVQLLRVLETRRIVLRKEQAMAFARAVAAGFNIDNLGFLITFADRFGASRLMKACTQFTELWRRKHETGQWIEVEPEAMSARSEFPPFNASGIMFMGDNMKQNLETLSISNGDANGEDAAKADQRTAQHSGAPSEYLHGPYQSAYPPWAIHPPYPMQGMPYYPGVNPYYPPPYPPMDDPRYHHSERRVSRKHSSDSKDSETLDDESGQSGSEIESSHGHKLHKKGKRSGKKKPSVVVIRNINVTSKKHGSSESESQTSSDVASEDSDDSHTEYSKRKNKRSSSKKKESRKIILEPGDEYSRDEVAHRQDGDQGNWNVFQSFLLRTEEKTKDNDADLFATERGPPPARRKESRTTDDPLLLVERDSTDFNEGKTIGFNSAHGRIRSRKMLSGDELVISAEGRRFVDGDIKEIEAGGGGYRRGASEDFIVYGQEKPMDSGSYLDPLAEGQYKSPTLMEKNMHSVADESFMIPVRSNSQDNLGPESCTAIDIDVELPGTVKKTTDAKAGDQLFYEPDELMPEREYEDVTYGYDPAMDYDSQMQIQPAIMVEDANADDVSLGVEGEVKKLEKDKKLRLQECLDKKKDASARRLPSSKTRLTDAQKRAQNLRAYKADLQKAKKEQEEEQIKRLERLKQERQKRIAARSSTSNSISTPQQVKVKPSPKTSPSTYKSSKFSDAEPGSFSPLRKLPARTTAESDHQKTGKASKLSDSSTNAVSKSTSSLAAMKKEKNGRNELSSERLKKLAEPKSNALTDRPSNSKFASMDHSRRKSMPEDTQTKKISAIMQLDQRKSATLPELKVKSPRAPSISVKNKTIAREIRDGDPGGKSPPTLEVTDGKKADVEVSRISNSDDNVVVEKTVVILENEVVSTTSSHSTSWKNIRE

SEQ ID NO: 53607 - protein, 70 aa, Oryza sativa
MKIKVKSALICYMVGLTSPHYLVLEWLDEVVMVGTLGLARFGHETFTDGNTWSTNEHRIGNTCMNDLSCM

SEQ ID NO: 53608 - protein, 255 aa, Oryza sativa; identical to SEQ ID NO: 29267

SEQ ID NO: 53609 - protein, 827 aa, Oryza sativa
MAGCSEGGGGDGEVACCGVGDTSPGTIVWVRRRNGSWWPGRILGPDELPPSQIMSPRSGTPVKLLGREDASVDWYNIEKSKRVKAFRCGEFDACIEKAEATEGTSVKKREKYARREDAILHALELEKKLLASKHQTQGSRPANVSVCSKHNKDLGSTRYKSKKSKKRKGITASSDIKKEAEQYVLHAGSKRNFQDSPTRGISDNLFGNHLGDISHVRHIQAGENLDSKEKITTAEKIRSDGSDFDESIEKCDRRQPLVQILHSSPKLPHQSQHNDGYGDVLTQGEMDRSPANYRAKRSRYVFLPTDSGETHSHSDLPSVQVASTGGDFETESYLHHPAFSEEQTSSDLVEKHIYESSERECSESETEDDAELLQCSDLILHPASHAHDPYFLPASDKFRHANIDADADELTYSSYMCQVNESEEDGSSELGVSQWHMKGKRNSRNAPKRSDMADGNPWLDKSDGFMEGSPYKINGRNPREGSMQIPNQQLLGQNFYQNEEVNYDSEETDFFEDTGHSEVNLYHGRTYSSCLKATRDFSRSYSYFNDYGNDSSKVSPLNRDSDKIFHFDRNAYWSGPSFYQKYSSRLRGRGPMLFDVDLKVQASYQGEHVPLVSLMSRLNGKAIVGHPVQIEILEDGSTDHLVFCGDVSLEGRTGGQPAWCTGRRTAMQRIPRSNPSGALDCDDEGTLAYPDWEMKPDFRKYSNSDFRKYSNSNHQVKVDKKSISNVRRPSASKSQKKQSKKASLSSQKVRTLSSISTGKKHHGVGGQAKAHKQSGIFGGLIKPGGIPLVTCVPAKVAFTRILEAVGRPPLAVAHRVRMASPALRDPS

SEQ ID NO: 53610 - protein, 116 aa, Oryza sativa
MVLKHTDPTAHAEVTAIREACKKLGKIELSDCEIYASCEPCPMCFGAVHLSRIKRLVYGAKAEAAIAIGFDDFIADALRGTGFYQKANMEIKKADGNGALIAEQVFEKTKEKFQMY

SEQ ID NO: 53611 - protein, 656 aa, Oryza sativa
MLAKMQSCRWILAYLLVVLVSLHGGANGFYLPGTFMHTYTPNEVISAKVNSLTSIETELPFSYYSLPYCKPPEGVKKSAENLGEILMGDQIDNSPYRFRVNVNESVYLCTTDPLTKEQAELLKKRARDLYQVNMILDNLPVMRFTEQNGVTIQWTGFPVGYNPMGSNEDYIINHLRFKVLVHQYQAQGDVVITSEDGVAMVESDRKSGFQIVGFEVVPCSVRRDPEAMSKLKMYDKVDSVKCPLELEKSQAIRENERITFTYDVEYVKSNIKWPSRWDAYLKMDGAKVHWFSIMNSMMVVFFLAGIVFVIFLRTVRRDLTRYEEMDKEAQAQMNEELSGWKLVVGDVFREPCCSKLLCVMVADGIQITGMAVVTIVFAALGFLSPASRGMLLTGMIILYLFLGIIAGYVGVRVWRTIKGTSEGWKSVAWLTSCFFPGIVFVILTVLNSILWGKKSTGALPISLFFTLLALWFCISVPLTLIGGLLGTRAASIEYPVRTNQIPREIPERKFPSWLLVLGAGTLPFGTLFIELFFILSSIWLGRFYYVFGFLFIVLFLLVIVCGEVSLVLTYMHLCVEDWKWWWKAFFASGSVAFYVFLYSINYLVFDLRSLSGPVSATLYLGYSLIMALAIMLSTGAIGFLLSFYFVHYLFSSVKID

SEQ ID NO: 53612 - protein, 186 aa, Oryza sativa; identical to SEQ ID NO: 33215

SEQ ID NO: 53613 - protein, 806 aa, Oryza sativa
MAFGRGSKMDGRRSSPSSSLCTTTTVVVFVALCLVGAWMMTSSTIFPLEITSNKKAAVKEQPARVNYGASEEAAAASGNSAEGVDRFGDTDNNDNAVPEEPNNTVPSEEEKFSENTVEKPVESSEEKAPPKEKEESKDTFDDANGKTEQSSAKEDGDSESGSGQSDGSKNGDDEEKSEEKKDDEQSDGERKDDQEEKAEGSGSKDTTDQPQIEETVDESGEKGQGAKSNEVFPDGAQSELLKESNTENGSFKTQDAESKNEKESQAASNSSDDETTYNWKLCNNNAGTDYIPCLDNEKAIKKLRTTKHYEHRERHCPVEPPTCVVPLPEGYKRPVEWPTSRDKVWYSNVPHTKLAEYKGHQNWVKVSGDHLLFPGGGTQFKNGALHYIDTIQQALPDIAWGKRSRVILDVGCGVASFGGYMFERDVLTMSFAPKDEHEAQVQFALERGIPAISAVMGTKRLPYPSRVFDVIHCARCRVPWHIEGGMLLLELNRLLRPGGYFVWSATPVYQKLPEDVEIWNAMSSLTKAMCWKMVNKTKDKLNQVGMAIYQKPMDNSCYEKRPENSPPLCKETDDADAAWNVPLQACMHKLPAGQSVRGSKWPETWPQRLEKTPYWIDDSHVGIYGKPGNEDFEADYAHWKRVVSKSYVNGMGIDWSKVRNVMDMRAVYGGFAAALRDQKVWVMNIVPTDSADTLPIIYERGLFGMYHDWCESFSTYPRTYDLLHADHLFSKLKKRCKLLPVFAEVDRILRPEGKLIVRDNAETINELQGMVKSLQWEVRMTYTKGNEGLLCVQKSMWRPKEIEASM

SEQ ID NO: 53614 - protein, 374 aa, Oryza sativa
MVLNKVLELFCVKKKDSKKKGKAINPLCKVAAPHPTANVSTNNSLLDPFSSGNGTVLLVQKHEPECSSVVSSMTRTEYGSESDGYNLFNQFDVVQDFSDHYYAKNSPGKTSKDWVKTIQNEWKLLQKDLPESIYVRAYEDRIDLLRAAIVGPAGTPYHDGLFFFDVRFPSEYPQSPPKVHYHSGGLRLNPNLYESGKVCLSLLNTWWGTGCEKWGKSKSTILQVLVSIQGLVLNDKPYFNEPGNKNSANTAPGEKYSLAYNQTASLLSCRTMMYSLRKPPKHFESLVARHFHERERVILDACDAYISGAVVGSSSAKGTKHPRDNNRSFADFKKSLEKYSELLRKDLAANRTHFLKLTRDSPAAADEIVECTSS

SEQ ID NO: 53615 - protein, 373 aa, Oryza sativa
MAPGRKMLGGKNKPPHPPSVLPDPAATPCLPPRSKTMVLGGNSTHSRHPSVLPDEAAAMEMLEEEDMDLSTSRAWNIMRNNRFANQLGIRKLAQIFQSSVAKKKAVGKKSKALLLGEDVAITGDCVTTGTGRASKRVLALENLEETMRCTRQRAMKQVSTTSLIEATEVGLEPDLSANQNQGDTNNTGQGNLTLSTELEPMGLSTTQQGTLTSSIQVETRGKSMGKEIDSISKGLGTMIPIIVKEGKKRPEAPMQTAKLASESGIIIRQHIPIYPSWTDYKNDSSQLDNLKGKLKGKFSIDIHSDPVIAAMEDILRCGTRHMRYRLKKKYFDGVPANQVRTTSPLKCMTDEQWTKLVDMWSSPEHKDKCAKTN

SEQ ID NO: 53616 - protein, 495 aa, Oryza sativa
MSGPGGREREAAGPAFSFSVDLVAAARRLLALLRSGDGERGGAGVVGPRSVRRYEELWMPLVAAEGAGGEAPMLVPPPDVRLVWLCHCFHHESYAAYCASRFGRLINRPSILDADNEEYAADHCRDVWAAHYPSEPFDLEDNETEGNSSNDKSASEIIEMVQRYTGLAARFASPFISEGVYHVAARRRYMRFLELIKKIVSTTQGNTRLVPSLDILLMWLAHQSFPVSYYADMAAMAVKDNVAKIVVGYGEVVSEEMVERTRVLWEEAYDEPYDMAGSEIDKAEVDAAREAFYWETAASEEDANRLYKGLQPRFIMEVYVFLKGEFDSEHTSKEFLRLRTQRCYRSLKLNIPLFNLSCKNWQKTWHLYCEFSTRGLIIEVRRSTSGCFRNSKLIKNISFSWSDMLHEKSLMLTEELDVRMKAMASITPPVQAPYLLKCVPDRVTDDGGAMISDVILRTKGYRPQEGRWLTRTVLDHSRKECFVIRIRQRDLAERC

SEQ ID NO: 53617 - protein, 590 aa, Oryza sativa
MHHVRSGLGSPDASSNSSKRKRGSCFAERNMDGRNSIRIKPDVSVRAREKCGGGGGHRYVIDLEKPATSDDDVEFVSYAGFGNRSQDRCYASAENCSTAVSSQLCVERNASRVSPGSVGSSDTLDCQSPIKPDNSESRHLLIDLNVPQEESLHVFYAPSQITCPTLVNSSSSHPGEFWNGSSNVYKKECGSGVGSSKGSSITVVAPSSAPDSSREVVAAYQFHDPKNLHGNIHARENSQHEHAVDKLCGSSSQYFLPQQRFSVSSCGRNDSSLALQKSGDNHVACQSGQPPLAVHTELQHDTSIVISSGEEKVLFDLNVPAESIDMESTITSNSFRDKLVKNDGSEETVTDHSFSKRNGVHAETSIEERTVGEHHISVSKDGNTTFFQESINNEIDKAQSSDLISVSSKHLIAETPHVDNIVCPELRASPDGASSPQETLIGNCDKMVCIAAETLVSIFSSSACTTDCPGTDSQTAAEDVNDEPQHSLDSYEEIVLNVEEIRDDGESIPVIPPDKDGPSCGIKLRRGRGLRNFLREIMPRLVSLSRHEICDDLHAIGYEPRKTRSRKTFGAQGSSSTRGRPPKHRPTARK

SEQ ID NO: 53618 - protein, 212 aa, Oryza sativa
MDSTLKDLQLDYVDLYLIHWPFQIKKGTELSPENFVKPDIPSTWRAMEQLYDSGKARAIGVSNFSSKKLGDLLCVARVPPAVDQVECHPGWQQAKLRAFCHTSGVHLSAYAPLGRMKGIAVDSVLPSVAEMLGRTPAQVALRWGLQQGQSVLPKSVSEARLKENMDLFGWSIPEELCAKLSEIEQVKQIRGDGFAHPESVYKTYEELFDGEI

SEQ ID NO: 53619 - protein, 1279 aa, Oryza sativa
MRPNRWRNGEANLIFTAFVLLLASLISQSSAAQCVWYGQCAKNDRGQPLNCGYNGPPKPLDDEGLSILQKRCPHLVDSDGRATTCCDAAMLKELDVNVAKVAGLFQRCPSCIRNLLGYMCDMTCAPDQSLFMEVTKFGVGGSSKVVDAVNIHIDQEYLQATFDSCKGVVMPSSGKFAMDMACGAHDAQSCTPQRWFDFMGDPTSPFVPFKMNITSSTGTFDDMIPRRPKFVSCSESFDNSSKPCSCVDCEKACPKTDSGLLPPESKLKWSFLGLNLIVIIDIGISAALIVAALIWAIFAGPQKPWLDETDEITEPNKLEKIGDSWSRFLERSFRWLGTACAAHPVMVLFISSWIIAGLSYGVQFLQVTTDPVQIWAAPNSLVRQEKTYFDTRFDPFYRAEQMFIKAVGLDEVKHQTPNGEITFGPVYNKEFLLALRDLTMKITELGKAEGAGLETVCLAPLASDFLGPVTTSQCTVFNIWGYFQNSLEEFEKPGRNYLDQINKCLRNAYDPDCLASYGGPAEPPVIVGDYLEKGQSVRDVNADPKKARAAILTFVLRNSLNPDEIEKAMKWEKLYVDFMQNWTKTEKPDFMDVAFSSERSVQDEIERVSKSEVSTVVISYTVMFLYISFSLGRFTSWRTYLVESKMTLGAGGVVVVMVSVVCALGVFGYIGTPTTMLTVEVIPFLVLAVGVDNIFIMVRTHRAMRDSGLFSGVDTEAERIGRTVGKAGPAVLLSSLSESACCLIGALSPMPAVNTFALFAATALAINFLVQITTFVALMTLDENRYLRARLDVACCIKMNHQRSLKVHPPLVQRLIKRCIAPYLLGDRRVRVVTIVLFACGVIISSGLATQINLGMEQEYAMPDDSHVLKYFRFMKDVFSLGPPVYFVLNPNDAMNFSNREHQNAVCGGMGCKDTSINTLIFSAARSPERSYLARPASSWLDDFFDWSTLDGCCKVFKNNGSFCPHNRGPEECDPCDIETDGERPTPEAFRKFLPFFLQDNPDATCSKGGHAAYAAGVDVVTDMHALADTRDTYFMGYHTPLLISDDYVGALRGSRKVSEAINNELKKAFPKAENPPNVFAYSVFYVFYEQYLTMAEDTAWSLFMSLSAIFVVVFFLNGLDIIAALMIIVPVAMIEANMLGIMMIWGIQLNAISLVNLVMSMGIAVEFCSHMVHAFQYSTAKGRVARAQDALIHTGSSVVSGITLTKIGGIAVLAWAKSQIFQIFYFRMYFSIVAVGALHGLVFLPSLLAVAGPRMNRARAKRIREHHETLEDREPSQE

SEQ ID NO: 53620 - protein, 121 aa, Oryza sativa
MMPTTCSTSSTTSASRTSSMAPTRPPMSMPAAVSLALCSTLTTLPETSREGTSLPLARAVVTRKRVATPTKRRLLLAAAACASSLAVLRAPSISLVNTFHASLLHLVLTIVMTPVPCTYLP

SEQ ID NO: 53621 - protein, 60 aa, Oryza sativa
MPDCTNTNQLVLFYPNKTESGKERKDSYRYRVILRKTVEISALFWKYCERQPKMKLLTLY

SEQ ID NO: 53622 - protein, 352 aa, Oryza sativa
MATTVATAMRRRRNLTPCDSRLATAVPLLVAFLLLLHAPPLAEAQPLPWQMCDTAGGNYTEGSTYQANVRALASALPVNASSSRALFAKGAAGAAPDVVYAIALCRGDTNASSCAACVATAFQDAQQLCAFNRRATMFDDPCILRYSDQDILANATDGQGNFIAWNYNNVSAARAAAFDAASGRLVNATAGYAAADPVRRFGTGEVGFDDATYPRIFSLAQCTPDLSEADCRSCLGRIIRWVPQYFAGKPGGRVFGVRCNFRFESYSFFSGRPLLQLPGPPPAPAPSPANMAPPSPPGTMGGRTRHRTGRVLAITLPIAGAILALIVLTCLFLEKENTCKEGLTSAILNKPR

SEQ ID NO: 53623 - protein, 777 aa, Oryza sativa
MAGQVSTGNAAASASMAGEGQEEDPAAAGTSHLVSFSPALAHGKEGHGFQSPAPMDAEIAGDVGAGGERITQKVDDKVVQTLIVPQVGMSFESKDKAYEMYNTYAGKVGFSIRKSNVKRRSNGTIYQKHMVCNKQGQQETSSSLDTTRTCCKARVQFSVCRKEIWMVQKVVLEHNHDLVSPNKSHKLRSQRRVIEADRQLIGQIREAGMKPAQVYGFMKEWYGGADKVPFSKMDCNNEIGRERKKYLESNDTQTLLEYLRNKQLEDPTFFYAIQVDKEDGRIANFFWADGQSIMDYACFGDFVSFDTTFDTNKCEMPFAPLLGTNHHKQTIIFGAALLFNQTIESFVWLFETFLTAMSGKHPSTIFTDQDAAMAAAIAFVFRNTSHRLCLWHIYLNGGKNLSHVIHKHPNKFLADFKRCVYEDRSEYYFNKMWHELLSEYNLEDNKWISNLYKLREKWAIVFRNSFTADITSTQRSEGMNNVYKKRFRRKLGLSELLVECDKVSATLRENELDADFKSRHSNPVTYIPNLPMLKIAAESYTRSMYSELEDEFKQQFTLSCKLLKTEGATLTFVVMPMEYDHEATVVFNPTEMTITCSCRKYECIGLLCKHALRVFNMNKVFTLPSHYILNRWTKYAKSGFYIQKQGSEKETLKAHAARISRHATSVELKCSVSKELLDDLEQAINKLDLEADNSLSKMQEKSCEVPLNSNGCVKDTLNGTISFLVPRVVKGPKSRRSKDVVEKKKWQKKCVDPTHCSMLFPVLLILFVFILLYATSM

SEQ ID NO: 53624 - protein, 367 aa, Oryza sativa
MATSFDRWEKDPFFPAAEEVQESADRMESVYRRWLQERKEVGGGAVETAAERGGGGWGRAAGDLRRELHTALGTAKWQLDELQRAIKSNYSVVLAGKDTRARHDDFVSAIGHRILEVEKFLKESNTTEGRGPLSWVRLDEGEREELAHFLSAGTYQKRDEVVTITSAGDIEVGSNARRVKKGVSIDSSNDSSGSAESGLVSTKEETAPGHRRTASAYADIGSWTITIPDEANGIDEQSFDDLPKVPLVKSPSSSVLMNAFQSKTRMKTKNGAKKLAGADQQDVVETLPLTNSRSCQGFDGLFQRSKSCLSTSDDEDNCNKKLYGCLGAFRRLLQRSQYQVQYGRPIQLLILAIVVLLVLIYAMKAIL

SEQ ID NO: 53625 - protein, 81 aa, Oryza sativa
MHVQAMGRARPRRLRSAGGQQQRSIGNPVRAAVRQWCRDVCPCRRSAIFAQVVDGGVTSRCNGKMALFRDCRCLVGSLICL

SEQ ID NO: 53626 - protein, 297 aa, Oryza sativa
MGSGSSILGADGEWGVTSLGDMPESCVAAVLLYLDPPEICQVARLNRAFRGAASADCVWAGKLPVNYRYLLAFAAAADDEGGDGGHGNGKRSSPSSKKDIFARLCRPTPFDFGNKEFWIDKNKGGICLSISSKAMVITGIDDRRYWSQLATEESRFHHIAYLQQIWWLEVDGELDFCFPAGSYSIFFRLHLGRPYRRMGRRICGTEQVHGWEAKPTRFQLSTSDEQHATSEYYLEQEGSWILYHVGDFVVLNSDELMKLKFSMLQIDCTHTKGGLCVDSVLIYPKGYRHEKANIVHM

SEQ ID NO: 53627 - protein, 770 aa, Oryza sativa
MENRNKEDMGPSQRNSCPKVHSSICSELTMMLDKVSSILPLIEAARPGCKAGIQELCNLYNIVEKGKLIIQHCVECSKLYLAITGEAIVSRCERIRDSLRRSLFLIENMVPPALANQIVDVHDDLGDIKFVIDPTEEEAGKTILEMLRQSDVTEELELETFLQAASNLNLTSPKSMLIERRAIKKLLDKISGTDPKKEGVLKFLLYLVKKYGKNIKPETGERNENMQSESQSSTPSSSFVSDTSTPGKWYTPTDIQRNEDQTSMSGAATPPAEFCCPISTKLMRDPVIITSGQTYERENIERWFREGYDTCPRTHIKLENFAMIPNTCMRDLIFNWCKEHGFIISDILPPSKNAYSYLPEQLHGYSMSSLHNVSVPLIAGKVRDFVIDHSTSSVALSEASYMSDSYHVRDMEEPKDSFSQFSWSADYQECLSFRNFNQDKFLRFFYELSKLPLELQDRSIGDLKIILNEENEASCAMVSNGFVEAFFDFLMNEDGSYSMQAQKVGFQFFRVFLSNSRTNILHMNEEAFRLFASFIDSELKTEALLTLHELVQHLSCRQSHLMASIITPLLESEDAEGLKLCLKIVCNLSSDSDVKPYLISLGIVSRLSPILSEGTFAECCLEILRNLCDVEEATVLITKTDRCLGSVAEYLDTGSPKEREHAVVILLAVCSHSSEDCLLVMKEGVMPALVDLSVNGIDEAKGCSMKLLHLLRDLRRTDQLNNSCSQEVVVTDVVEGPPDSSIHKQPIPKSSRFFQRKLNIFSKPRSLTLF

SEQ ID NO: 53628 - protein, 345 aa, Oryza sativa
MARPRLLLLPLLAVAAAVLSSPLGRALAKTAKKSNDIVNGPLLTSKINAKRTLIVGPEDEFKTVQSAIDAVPVGNTEWVIVHLRSGIYREKVMIPETKPFIFVRGNGKGRTSINHESASSHNAESAAFTVHADNVIVFGLSIRNSARAGLPNVPEVRTVAAMVGGDKIAFYHCAFYSPHHTLFDVAGRHYYESCYIQGNIDFIFGGGQSIFQCPEIFVKPDRRTEIKGSITAQNRKQEDGSGFVFIKGKVYGVGQVYLGRANEAYSRVIFADTYLSKTINPAGWTSYGYTGSTDHVMLGEFNCTGPGSEATKREPWSRQLTQEEADKFINIDFINGKEWLPAYYY

SEQ ID NO: 53629 - protein, 519 aa, Oryza sativa
MPIPIAFLFLLPLLLAASSHATVSSHATASVVPQPRGFYINCGSEKEEQIGSIKWIQDEGFIAVGNMSAVDKPNILPLLATVRYFPDATAGKYCYQLPVVKGSRYLVRTTYFYGGFDGGDVPPVFDQIVDGTRWSAVNTTDNFRRGMSTYFEMVAEAQGKTMSVCLARRADTRSSPFISALELVSLDDSMYNTTDFDKYVMSTVARSRFGAKGEIVSYPDDQYNRYWAPFTDANPTVESHSAITPEEFWNVPPAKALRAGVTTSRGKKLSVQWPPVELPAATYYVALYFQDSRTASPYSWRVFDVAVNGKEFFRELNASAAGVMVYSTMMPLSGKMEIVLTPNETSPVGPLINAGEIYQIVPLGGRTATRDVVAMEELARSIKNPPPDWAGDPCLPRQNSWTGVICSEGSPVRVVSLDLKNHGLSGSLPDSIGNLTGMKNIYFGGNKLTGSIPDLSSMHILEELHFEGNQLSGPISPSLGTLTNLKELYLNNNNLTGQIPESLKNKPELDMRTEGNKLN

SEQ ID NO: 53630 - protein, 504 aa, Oryza sativa; identical to SEQ ID NO: 43064

SEQ ID NO: 53631 - protein, 347 aa, Oryza sativa
MGDSSRSVSIDVERISFGGKEHRVRTRYGSVSVSVFGDEDKPALITYPDVALNYMSCFQGLFFCPEAASLLLHNFCIYHITPQGHELGAAPISSDVPVPSVDELVDQVADVLDFFGLGSVMCLGVTAGAYILTLFATKYRDRVIGLMLVSPLCKAPSWSEWLYNKVLLNLLYYYGSRGLVKECLLQRYFSTEVRGNGQDPESEIVQACRSLLHERQGSNVWRFLQAINERHDLTEALKKLQCRTLIFVGENSQFHDDAVHMTTKLDRRYCALVEVQACGSLVTEEQPHAMLIPMEYFLMGYGLYRPSQLDSSPRSTLNPFCISPELLSPESMGVKLKPIKTRISLKV

SEQ ID NO: 53632 - protein, 1158 aa, Oryza sativa
MGKPGKYGDGDDDDSEEEQLSPSSSAGEEEEEEVEEEEGEEQQEEQGEEEEGFSGDEEEQEVEGEADGEQVEEEEEEESSVGEEEAEAEGEEEEEEVEEEQGAGEEEEEEVDEEEIEAVTTGAGGDDDDEEVGDDGGAEEESQSTEDDEVAAGKDGGGEDGDKLEDATGNAEIGKRERAKLREMQKLKKHKIQEILDAQNKAIDADMNNKGKGRLKYLLQQTEIFAHFAKGNQSTEKKSRGRGRHASKMTEEEEDEEYLKEEEDALDGAGGTRLVSQPSCIKGKMRDYQLAGLNWLIRLYENGINGILADEMGLGKTLQTISLLGYLHEFRGITGPHMVVAPKSTLGNWMKEIQRFCPVLRAIKFLGNPEERNHIRENLLVPGKFDVCVTSFEMAIKEKTALKRFSWRYIIIDEAHRIKNENSLLSKTMRIYNTNYRLLITGTPLQNNLHELWSLLNFLLPEIFSSAETFDDWFQISGENDQHEVVQQLHKVLRPFLLRRLKSDVEKGLPPKKETILKVGMSEMQKQYYRALLQKDLEVVNAGGERKRLLNIAMQLRKCCNHPYLFQGAEPGPPYTTGDHLIENAGKMVLLDKLLPKLKERDSRVLIFSQMTRLLDILEDYLMYKGYQYCRIDGNTGGEDRDASIEAFNKPGSEKFVFLLSTRAGGLGINLATADVVILYDSDWNPQVDLQAQDRAHRIGQKKEVQVFRFCTEYTIEEKVIERAYKKLALDALVIQQGRLAEQKAVNKDELLQMVRFGAEMVFSSKDSTITDEDIDRIIAKGEEATAQLDAKMKKFTEDAIKFKMDDTAELYDFDDDKDENKLDFKKLVTDNWIEPTSRRERKRNYSESDYFKQALRQGAPAKPREPRIPRMPHLHDFQFFNTQRLNELYEKEVKYLVQANQKKDTVGEGDDEDQLEPLTVEEQEEKEQLLEEGFSTWTRRDFNTFIRACEKYGRNDIKNISSEMEGKTEEEVQRYAKVFQERYKELNDYDRVIKNIEKGEARIYRKDEIMKAIGKKLDRYKNPWLELKIQYGQNKGKLYNEECDRFMLCMVHKLGCGNWDELKAAFRMSPLFRFDWFVKSRTTQELARRCETLIRLVEKENQEYDERERLARKDKKNMSPAKRSSSRSLDTPPQSSSKRRRQSYTEANAGSGRRRRG

SEQ ID NO: 53633 - protein, 266 aa, Oryza sativa; identical to SEQ ID NO: 31854

SEQ ID NO: 53634 - protein, 53 aa, Oryza sativa
MAAPPVMEVDSPTTGDEEDEGVFILLKKMETGLFSWSLGMLHPTVLACCTLLH

SEQ ID NO: 53635 - protein, 418 aa, Oryza sativa
MDSHNSAPPQIAEVRMDISSSTSVAAGNKVCRGAACDFSDSSNSSKDARERMASMRKLIIAVILCIIFMAVEVVGGIKANSLAILTDAAHLLSDVAAFAISLFSLWAAGWEATPQQSYGFFRIEILGALVSIQLIWLLAGILVYEAIVRLINESGEVQGSLMFAVSAFGLFVNIIMAVLLGHDHGHGHGHGHGHGHSHDHDHGGSDHDHHHHEDQEHGHVHHHEDGHGNSITVNLHHHPGTGHHHHDAEEPLLKSDAGCDSTQSGAKDAKKARRNINVHSAYLHVLGDSIQSIGVMIGGAIIWYKPEWKIIDLICTLIFSVIVLFTTIKMLRNILEVLMESTPREIDATSLENGLRDMDGVVAVHELHIWAITVGKVLLACHVTITQDADADQMLDKVIGYIKSEYNISHVTIQIERE

SEQ ID NO: 53636 - protein, 596 aa, Oryza sativa
MIAYVRDDELHTVGFSDGQTTQLTYGASESGKIHGLAEYIAQEEMERKMGFWWSPDSKHLAFTEVDSSEIPLYRIMHQGKSSVGPDAQEDHAYPFAGAANVKVRLGVVSSHGGEITWMDLLCGEPNSIHGDEEYLARVNWMHNSAIAVQVLNRTHSKLKLLKFDIASGKREVILEEEHDTWITLHDCFTPLDKGVNSKHPGGFIWASEKTGFRHLYLHDKNGVCLGPLTQGDWMIDQIAGVNESSGVIYFTGTLDGPLETNLYSTNLFPDWSLPLQVPKRLTHGTGRHSVILDHQLLRFIDVYDSIKSPPVILLCSLLDGSVIMPLYEQPLTVQPLKKFQQLSPEIVQIEGKDGTALYGTLYLPDEKKYGPPPYKTLVNVYGGPSVQLVSDSWISTVDMRAQFLRSKGILVWKMDNRGTARRGLQFEGQLKYNIGRVDAEDQLAGAEWLIKKGLAKPGHIGLYGWSYGGFLSAMCLARFPDTFSCAVSGAPVTAWDGYDTFYTEKYMGLPSEQRDAYRYGSIMHHVKNLRGRLLLIHGMIDENVHFRHTARLINSLMAEGKPYDILLFPDERHMPRRLGDRIYMEERIWDFVERNL

SEQ ID NO: 53637 - protein, 456 aa, Oryza sativa
MLLNCDNISGRLLCELGATCQELRVLSLNALAERRGLPISFSDLQQLLNGCSQLESLRLALDFSMFDDPNFSHVWASASEALTSLEIGYIPMTMLLELLTVAMESQRCMHHVKEPVFFPSLQKLCLTVDFITDHLIGSLSTALPSLTHLDLQDAPIIEPTTSSDLTNAGLQQINPNGKLKHISLMRSQEFLFTSFRRVNDLGILLMAEKCSSLESVCLGGFSRVTDTGFRAIIHSCSGLHKLRVSHGSQFTDLVFHDIIATSLCLTHVSLRWCNLLTDVGIERLSFNKDLNVLDLRDCRSLGDEAVRSLSCLPKLQILFLDGSDISDQALKYLGLGTCPLASLSLRGCRKLTNGCIPLLFAGSVKQSLQVLDLSRIPGITDDGIMLLARSRTPVIELRMRENPKIGDAAVMALASMLVDVEPMAVACSCWIFMIVVRLHHLQSGGSRNHISQDCDG

SEQ ID NO: 53638 - protein, 621 aa, Oryza sativa
MSISMKDVDPAFRGVGQKDGLEVWRIENFKPVPVPTSSHGKFYMGDSYIILKTTALKNGSFRHDLHYWLGKDTSQDEAGTAAILTVELDAALGGRAVQYREVQGGETEKLLSYFRPCIMPQPGGVASGFNHVEVNQQDHVTRLYVCQGKHVVHVKEVPFVRSSLNHEDIFILDTANKIFQFNGSNSCIQERAKALEVVQYIKDTFHEGKCEVAAVEDGKLMADTEAGEFWGLFGGFAPLPKKTSSEDNGDDKETVTKLLCFNQGTLEHISFESLEHELLETNKCYLLDCGAEMYVWMGRGTSLQVRKGASEAAEKLLIDENRKGSNVIKVIEGFETIMFKSKFNKWPPTPDLKLSSEDGRGKVAALLRSQGLDVKGLMKAAPEEEEPQPYIDCTGHLQVWRVNGDGKTLLSSSDQSKLYTGDCYIFQYTYTGDDKEECLIGTWFGKKSVEEDRTSAISLASKMFQAAKFQAAQARLYEGKEPIQFFVIFQSLQVFKGGLSSGYKNFIAVNGTDDDTYVEGGLALFRIQGSGSENMQAIQVDAVSSSLNSSYCYILHNGNTVFTWTGNLTTSLDNDLVERQLDVIKPDLPSRSQKEGRETDQFWELLGGKCKYSNKKNRKRK

SEQ ID NO: 53639 - protein, 502 aa, Oryza sativa
MPRSSRMNLWPHCFPCFDDGDRSGNRFSTVCNFPDDLLPSLGATAHQPPKLRKYLVSPYDPRYKVWETFLIILVVYSAWICPLEFAFLRYLPSAPFVVDDVVNGFFAVDIMLTFFVPFVDKKSYLLVNDPKKIAVRYLSSWFVFDVCSTVPFHSISLLFNEHGHDLGFKFLNVLRLWRLRRVSSMFARLEKDIRFNYAVIRCTKLISVTLFAIHCAGCINYLIADRYPDPRRTWIGAVMPNFREDGLWIRYVTAMYWSITTLTTTGYGDLHAENAREMLFGICYMLFNLWLTAYLIGNMTNLVVHSTSRTRDFRDVVQAASEFAARNQLPQQIEEQMLNHICLRYKTDGLKQQETLDVLPKAMRSSISHYLFFRVVQGAYLFKGVSSRFIQQLVTEMQAEYFAPKEDIILQNDSPSDLYLLVSGAVDILVFLDGTEQVYRRAAEGELLGEIGVLCNKPQSFTFRTTELSQILRISRTKLLGIIQENREDGDIIRSNLQQVNV

SEQ ID NO: 53640 - protein, 1297 aa, Oryza sativa
MEAPPLAAPICASQGAMGSLLGKMEELLVAPDGSRLPKGVKDRMLLLGGDLGVVAAYLADLSELEDPPPTAKRWMREVRELSYDIEDYIDEFCAAPRPGRRANTMARFVCRIGRVKVARLPKRLKRHQQMGKMVSQFRIYVEEAIERHGRYGLDCCDHRRRYVSFGPMLPSRPYGEEDAQLVIDGRVSEFIERLANDEDQKLKVVSVVGSSGIGKTTLAKLLYNRIGGQFDCRAFVRISRKPDMKRVFREMFFQLQRKQPPDDYKELALIDSIREYLQDRRYLIIIDDLWAASVWDLINQAFPEVILSSRIVIITQVEDLALTCCCYDTEYIFEMKPMDDEHSTTLFLQRFFGFVSDCPQQFKEVSNKIVQICGGLPLATISLASLLASQPVILMDLCLYIRNSLSSAFRTNSSIEGTRQVLNLSYNNLPHYLKTCLLYLNMYPEGYKICKDDVVEKWVAEGFIDQIEGRDLEKVAGSYFDELIDRRFLQPSRLNYNNEVSTCTIHDEVRDLIAYKSVEENFVLVLDFYRKDVELSDKVRRLSVHFGDIKYAKIPTNIRTSEVRSLTFFGLCKCMPSLTEFKLLRVLNLQLSGHVGDELLDLSGISELFQLRYLKIACDIRTELPSQMRGLKYLETLQMDTTLTAVPWDIIFLPCLLHLHLRFDMNLIDLMGHMTPPSELGSSSSNSSPSGGIISNLNNVRDIHLTFCALPSKHLERNMEILGSLLGRLGNLKNLTLVSSSSQKKIAASGASEVTILWDNLAPPPLLQRFEWLLHSCIFYRVPKWIGELGNLCILRIAVRELVKNSVDILRGLPALMALSLNVHRASVENIFFDKVGFSVLKYFKYNCSVPWLKFEAGAMPNLRKLKLGFSALGDLYGTAPIRIGHLLGLKEISVKIHGASVDAESALTSAVSNHPSNPRINVQLVDKIFYGDRVTKEKDHGSEEEQNAIMSANFDEYHQTQDKESSDANKQVGSIVPLPREQEHGILEHDEYAPKDPDKYKQSDIRSVSSMYPWHLKFLGALSIHGGTRLATAPRKAEDAYISYAMKGNMQDSVHMPDSSCYLSMLVLPMALDMKSHLYESFEVTLARANTWLYASQASGVPIKLMSVQSDDLLTKISRVGDATSATVNSGLLPDLSNATLEDYQGYNTEVVKAARLWYSSIGGEMPLEITPKVGDTKLGFAISRTEEGFIYISSVLQDDNDSETPSTRSGMHNLFNRAREASKLLVISRVSNEKVLPWMISSSGAIRCFDTLSISQKLSLSRYPLCSFQLHLLMWEKPIHPAERSIHRPKMPFFF

SEQ ID NO: 53641 - protein, 561 aa, Oryza sativa
MLLLIIALSLLEQVFGYSASMTAFLIGLAMPRDGPTARTLVDRLTYPVHQLVMPLCFGAIGARLDFAAVGSFTAMQFAVAVAFTTLLGAVGKVGGTVLAGRMLGISARESLVLGFLLNVKGYCDILAINFGNQAGIWGQTAQVVLLLSSILNTFMAGPAAAAIVRQQRAASRYRSRCLQDLKVDHELRVLVCVHGAGGVHTMLTLAELSKGTAPLAVYLLHLVELMAARKYAITHLYHDADADDDEWGYAREIEQVAAAVNTFTYDAGVPVRQMTAISSLGSMDADVRNGVEDSRASLVIVPFHKEQRYDGRMVCRREGRRQLNQRILQRLPCTVGVLVERRLGGGGDKGAEDVVKNQVVAVFLGGPDDREAVAYATRLAAHPWVSVTVVRFLPARQDDITIGIDEQLLATTKSHGGEGAMEVAVEDEEAMADEEFMADVYARLVLAGQVEYTERYVSNGAEMVNSLSAMVGTYSLFVVGKGGGGSAAAAMTSGMGGLLEDECPELGPVGEVLASDDFTACGSVLVLQQHSAHVHRRMRRWNPNIHITTTPSSSDHHSHPP

SEQ ID NO: 53642 - protein, 191 aa, Oryza sativa
MESSSRDTANKKIKLSKDIGLDRLTATTVQEAPKRPRTTSLKKNQECSRQKKRKISKWDGSYSVIIEWLNYYSVDESDEDEVPLINKRTERRKRQKLLKLVLARESNSGSEGASSTSFVENGRNSSSAGSYPLSQGDNDKSENVQANRVDVSSVPDHPVSSHVAAEDQAGQAASSPLNSPTRGIVVDISDG

SEQ ID NO: 53643 - protein, 252 aa, Oryza sativa
MSMAREHFVLIHGEGHGSWCWFKLRWLLESSGYQVTCIDLAGAGVDPTDPNTVQSFEQYDKPLLDLISAIPEDEKVILVGHGSGGLSLIHAMHQFVDRIRQAIFVAATMLPFGLQTDEDKKDGLPTLPENEINLIFGTGADDPPTTAALRPEFQRERLSQQSPEEESVLASMLMRPWPVTAISTASFEGDDERLNRIKRVFIKTGRDHMLDPQQQDSMIKKWPPSEVLEIDTDHSPFFSAPEQLFNLIVKSL

SEQ ID NO: 53644 - protein, 491 aa, Oryza sativa
MENGKCNGSSTTKCNGAAAAAMHVAMLVTPGMGHLIPLAELAKRLAARHGVTSTLLTFASTASATQREFLASLPPAIESVSLPPVDLSDLPADAAIETLMSEECVRLVPALTAILSGIRERRRLVAFVADLFGADSFDAARDAGVPRRYLFFPTNLHALTLLLHLPDLDVSMPRRVPRPGASPSGSPAACPSRGRTSSCRSRTSPGRATGGWCTTARASRDADAILVNSFDAVEPDAARVLRHPKPGVPPVFPIGPLIQTHCAGDDDAAAPPSPRAACLDWLDRQPDRSVIFVSFGSGGALPTEHMRELALGLELSGQRFLWVVRSPSDEGEVSANYYGAETKKNPFGYLPEGFVERTKEVGLLVPSWAPQTKVLAHRATGGFLTHCGWNSVLESLVHGVPMVAWPLFAEQRQNAVMLTEGAGAAIRVPESKGKEKIAAVVREMMVGEGRGAAVRAKVAELQKMATDGLRDGGAATSALDEVVDKWTGGEK

SEQ ID NO: 53645 - protein, 748 aa, Oryza sativa
MRILEASPENRAALLLGLEYLIGISYVDDTEVFKVCLDYWNVFVLELFEAHNQMEPAASVNMMGLQAQMLPGVDGTITAVQQRRQLYSGPLSKLRMLMICRMAKPEEVLIVEDENGNIVRETMKDNDVLVQYKIMRETLIYLSHLDHEDTEQQMLKKLSKQLNGEDWSWNNLNTLCWAIGSISGSMVEEQENRFLVMVIRDLLNLCEITKGKDNKAVIASNIMYVVGQYPRFLRAHWKFLKTVVNKLFEFMHEMHPGVQDMACDTFLKIVQKCKRKFVTQQVGENEPFVSELLSSLATTIGDLEPHQIHTFYESVGHMIQAESDNTKRDEYLKRLMSLPNQKWAEIIGQASQSIDILKNQDVIRSVLNILQTNTSVASSLGPHFFPQISLIFLDMLTVYRMYSELVSSTIAEGGPFASRTSFVKLLRSVKRETLKLIETFVDKAEDLPHIGKQFVPPMMDPILADYARNVPDARESEVLSLFATIINKYKGEMLEDVPRIFEAVFQCTLEMITKNFEDYPEHRLKFFSLLRAIGTHCFQALIQLSSQQLKLVIDSINWAFRHTERNIAETGLSLLLEILKNFQASGFQNQFYKTYFLNIEQEIFAVLTDTFHKPGFKLHVLVLQHLFCVVDGLTEPLWDASSVPYQYTDNAMFVRDYTIKLLGSSFPNMTPTEVTKFVDGLLSSKHDLPSFKNHIRDFLVQSKEFSAQDNKDLYAEEAAAQRERERQRMLAIPGLIAPSELQDEMVDS

SEQ ID NO: 53646 - protein, 524 aa, Oryza sativa
MGVVEAEALHGAVEALAGSLQPHVATAFFVFSACTVALAALLAVVRLRPPWWCDCTVCEAFLTASWAGEFDNLCDWYAHLLRTSPAQTVHVHVLRNVLTANPVTVDHVLRARFDNYPKGAPFSAILADFLGRGIFNVDGDAWLFQRKLAAAELASPALRAFAARVVASELRCRLIPLLHSASREGNGKVLDLQDMFRRFAFDSICKISFGLDPGCLELSMPVSTLVEAFDTASTLSARRATVPMQIIWRLKRFLNVGDERKLRDAVRLVDALAAEVIRQRRKLGGAATGSDLLSRFMGSIDDDKYLRDIVVSFMLAGRDTIASALTAFFLLLSDHPEVATAIRDEVARVTGDGNRTMAATFDKLKDMHYVHAAMYESMRLFPPVQFDSKFAAGDDTLPDGTVVAKGTRVTYHAYAMGRMESVWGPDCAEFRPERWLRDGRFVPESPYRYPVFQAGVRVCIGKELALMEMKAVIVAVVRSFGIEAIARSSRRPKFAPGLTATFAGGLPVRVRRRRARASGHNPPI

SEQ ID NO: 53647 - protein, 82 aa, Oryza sativa
MLLMLAAEHSAIYIKFGTAQSNPMVSSEHLFMKFLRSHAHFIPNYKACIYNVQDNILAKMMLLQEWEKDDRFIYVWLLSFFN

SEQ ID NO: 53648 - protein, 247 aa, Oryza sativa
MMAASAGPGVVVVALVVVVYLILLIRPAASFRVNVGVGIGGGIGIGNQNQNQDQNQNQNQKPYYDDSNNNNNYDEGEGEGGDDQEEGPEAAAPVGPGQSFTGGRGTYKYMAHEFLDAHNKVRAQYGLQPLKWSNKLARYARRWSAARRFDCVMMHSPESPYGENVFWGTGWGWRATDAVKSWAGESSVYDWRGQSCNPGQMCGHFTQIVWNDTKLVGCGRSECVAGGVFITCSYDPPGNWKGEVPLT

SEQ ID NO: 53649 - protein, 266 aa, Oryza sativa
MDPSHYKGNHTYVPVSQKGYWQFEMGDVLIGGKTTGFCASGCSAIADSGTSLLAGPTAIITEINEKIGATGVVSQECKTVVSQYGQQILDLLLAETQPSKICSQVGLCTFDGKHGVSAGIKSVVDDEAGESNGLQSGPMCNACEMAVVWMQNQLAQNKTQDLILNYINQLCDKLPSPMGESSVDCGSLASMPEISFTIGGKKFALKPEEYILKVGEGAAAQCISGFTAMDIPPPRGPLWILGDVFMGAYHTVFDYGKVRVSFAKSA

SEQ ID NO: 53650 - protein, 331 aa, Oryza sativa
MALLLPVVLYPLFVTGGLMITGVPEASPLSGYLSAHNFILSVDGLNITRADEWMKMLTQDNVVQISSRDLLEGSEGYRATGSRKGYCVPNSWMDASKNLWQINDKLSCPDDLVAFQRMSEKGIGKKEVEDKYCLIAKDVVKLKKCGNGWRGAEDGRSNFACLEDEYCLVPVLGPGISWIEISYARPYSLECLQKERNSSLLHDGNNNPGLGPCQGTFVYAGDLLSAAHSIKLSSYRPRWPLLLFIADVPRILQDGLSCLFRVSAALAVVNRLPVYFLDGEAILETMLSYFSWFTRRQQRNILKVCRFLWTILSIVLFSRTLYSMTLYYGFV

SEQ ID NO: 53651 - protein, 414 aa, Oryza sativa
MYLIYIDFMNNMGHCNFELVPSWLFTWFPPLKYLMYTPSFHSLHHTQFRTNYSLFMPFYDYIYNTMDKSSDTLYENSLKNNEEEEAVDVVHLTHLTTLHSIYHMRPGFAEFASRPYVSRWYMRMMWPLSWLSMVLTWTYGPSFTVERNVMKKIRMQSWAIPRYSFHYGLDWEKEAINDLIEKAVCEADKNGAKVVSLGLLNQAHTLNKSGEQYLLKYPKLGARIVDGTSLAAAVVVNSIPQGTDQVILAGNVSKVARAVAQALCKKNIKVTMTNKQDYHLLKPEIPETVADNLSFSKTGTAKVWLIGDGLDSAEQFRAQKGTLFIPYSQFPPKMVRKDSCSYSTTPAMAVPKTLQNVHSCENWLPRRVMSAWRIAGILHALEGWNEHECGDKVLDMDKVWSAAIMHGFCPVAQG

SEQ ID NO: 53652 - protein, 141 aa, Oryza sativa
MALEMATAVQTPFPLPDMSSPRSSLVYFSFISSISEQHPSINHQKHQRTLPEIKTGWHIYTFILQGLLVHNLLQLLHAELAHRWREAWCRGRRAAHASPSWRRWRIVLLLLATAIVGERRHTEQRSRVVAIVAVFVEAREA

SEQ ID NO: 53653 - protein, 387 aa, Oryza sativa
MAPKKVLLLCGDYMEDYEAMVPFQALQAYGVSVDAACPGKKAGDSCRTAVHQGIGHQTYAESRGHNFALNASFDEVNINEYDGLVIPGGRAPEYLAMDEKVLDLVRKFSDAKKPIASVCHGQLILAAAGVVQNRKCTAYPAVKPVLVAAGAKWEEADTMDKCTVDGNLVTAVAYDAHPEFISLFVKALGGSVTGSNKRILFLCGDYMEDYEVMVPFQSLQALGCHVDAVCPDKGAGEKCPTAIHDFEGDQTYSEKPGHDFALTASFDNVDASSYDALVIPGGRAPEYLALNDKVISLVKGFMDKAKPVASICHGQQILSAAGVLQGRKCTAYPAVKLNVVLGGATWLEPNPIDRCFTDGNLVTGAAWPGHPEFISQLMALLGIKVSF

SEQ ID NO: 53654 - protein, 364 aa, Oryza sativa
MKLLRVVLVLLLPAVSSCLPCRRRDDYDYDSIFSFGDSFADTGNGAVVFAEHSLFSPATKPPYGMTFFGQPTGRNSNGRLIIDFIAEKLGLPFVPPYLAHNGSFRQGANFAVAGATSLDASFFSDIPGVGKFVLNTSSSVQLGWFDSLKPLLCSPAQECKGFFHKSLFFMGEFGVNDYSFSVFGKTPLEVRSMVPDVVKTISSATERIIKRDGAKAVVVPGIPPLGCMPPNLAMFPSTDPAGYEPGTGCLRQFNEIAVYHNTLLQDAIKNVQKNHPDVRVIYADFFTPVIRIVQSPGTFGFTSDILRCCCGGGGKYNFNMSAGCGMPGATVCEDPSTHLFWDGHMTEAAYHFIADGWLNSINES

SEQ ID NO: 53655 - protein, 72 aa, Oryza sativa
MLHSLYNRHRKGAHKRYHKLCWLWCYQAYSGRVPIRDITNYAGFGATQTYSGTVILKGLLWVLEVLIHCFDQ

SEQ ID NO: 53656 - protein, 50 aa, Oryza sativa
MVPDTRYQPVPDFRYQRYQSVPKVPSTRYQLIPKVLGIKMECTWKRRGVT

SEQ ID NO: 53657 - protein, 711 aa, Oryza sativa
MRAAPFSADGNGAAELAGSIAALLWPEDKGGGGGGGGGSLLVEPRSVLDCRGSPSPPNSTSTLSSSHGSGAADSISTGVAAVSESSAAAAEATRWAAPGEHGGGGGGELPPIPGALDVGFVAEESWDAMLGDAAAAAGQEQTFLNWIMAAPGDMEPQAPGLSQQQLLANAAGFGFPLQHHPGGVSSPAALASDLSSSGGRSLTSSSGSNSKATSAFGLLSPEAALQPPPATTAPFHNGADMKPPLLGLPSPTLLLNQHQPTPASTLFMPFPSFSDHQQQPLLQPPPKRHHSVPDNLFLLHNQPQPPPPAPAQCFPFPTLHSAVPFQLQPSMQHPRNAMKSTAAAAAAQQQHLLDELAAAAKATEVGNSIGAREILARLNQQLPPIGKPFLRSASYLKDALLLALADGHHAATRLTSPLDVALKLTAYKSFSDLSPVLQFANFTVTQALLDEIASTTASCIRVIDFDLGVGGQWASFLQELAHRCGSGGVSLPMLKLTAFVSAASHHPLELHLTQDNLSQFAADLGIPFEFNAINLDAFDPMELIAPTADEVVAVSLPVGCSARTPLPAMLQLVKQLAPKIVVAIDYGSDRSDLPFSQHFLNCLQSCLCLLESLDAAGTDADAVSKIERFLIQPRVEDAVLGRRRADKAIAWRTVLTSAGFAPQPLSNLAEAQADCLLKRVQVRGFHVEKRGAGLALYWQRGELVSVSAWRC

SEQ ID NO: 53658 - protein, 669 aa, Oryza sativa; identical to SEQ ID NO: 44959

SEQ ID NO: 53659 - protein, 150 aa, Oryza sativa
MGEESPAAGGGAAAAVAGKPSGTALPRRGKSCKGCLYYSSMLRSRGFNPVCVGIPRSIPQVPSYVVDEPREEAAAQGHDLRQFKYACAGYSMFVVDNKDGRSGEKEGKTLLPYCQGLELLVDSRLVEKKSPNNEPATASYRKEGMLKYFS

SEQ ID NO: 53660 - protein, 128 aa, Oryza sativa
MTRQTRFLKRLGGDYSKTVGVIDLGGGSVQMAYAISSGTAANAPEMPDGQDPYIIKEYLKGRDYNVYVHSYLHYGARASRVEILKRKNGTFSNCMLRGFCGKYIYNGEQYDATARHKEQTTTSAEMRW

SEQ ID NO: 53661 - protein, 417 aa, Oryza sativa
MSVATEACPSPKLHTRLRLWEFADRYVFEPVDGLADLFLSVDRTNGSMSLVEELPPRGPSTNPKVRIVFGVIGVLKLAVRSYFLVITGRDCVGSYLGHAIFKLTGLKVLPCNNSLNTSSAEQKKMESEFSELLDAAERTIGLYFSYDVNLTLTSPRLHDLGDQFKSLPLWRQAEPRFLWNGYLLEPLIENKLHQYLLPVIQGSFQSIHAEVGSEKVNVTLIARGCTRRIGTRMWRRGADPEGYAANFVESEQIMQSKEFTASYVQVRGSMPFLWEQIVDLTYKPSFDVVRVEEAPRVLERHFHDLQKKYGAVVAVDLVNTHGGEGRLYERYAKSIEPILSEDIRFVHFDFHQICGHIHFERLSQLYDQIEDYLKKHRYFLLNSKGEKMEEQTGTVRTNCVDCLDRTNVTQSMIGRKI

SEQ ID NO: 53662 - protein, 277 aa, Oryza sativa
MWKLKFGEGASNPLLRSSNGFLGRETWEFDPNGGSPEEHAVVERLRRDFTRNRFTQRECSDLLMRMQFAKENQVYSKHEVSNLKDSSEVTEEVLLTSLRRVLDQYSSLQAPDGYWPGGYSGILFILPLMIFALHVTKSLNDVLSSEHIREICRYIYNIQNEDGGWSTHTLGPSSMFGSCVNYATLRLLGEVLDEHNDGLSKGRAWILSHGSATVAPQWAKIYLSVLVFTIGQGTIQLFQNYGCFHIFFPFIQEDFGAFAGWFICQCLIYMQKDLLGQ

SEQ ID NO: 53663 - protein, 155 aa, Oryza sativa
MVVVLHGADHPRCHVELCSILHAHVYPTGSIEHQIGDLICDILIYGCGPIWVIKVSRWNCHGIKCSSLSFHVKKKPAIGVICGKESAAELHSRGQRLCDQDGVCWVLESFPADSRASCSSNHKIPGVEHAGIGCTSCSWIPYLSIGGISERKYTS

SEQ ID NO: 53664 - protein, 381 aa, Oryza sativa
MEAAAAMEAGRKLAARHPHGRSRTAHNMSSSSLRKKSDAALVRKVPVAPLRPLLANLQEVFLATKLAVLFPAVPLAIAAQCFRFDQVWVFALSLLGLIPLAERVSFLTEQIALYTGPTVGGLLNATCGNATELIIALFALLKGKIEVVKCSLLGSVLSNLLLVLGTSLFCGGVVNLGARQPYDRNQSDVSTALLFLAVLCHSAPLLLRYAVAAGEHSVSATSAAASLDLSRACSFVMLASYVAYLFFQLKTHRQLFEPQEVDGGDAGDDDEEPALGFASALFWLALMTAVISVLSEYVVGTIEPTSQSWGLSVSFISIILLPIVGNAAEHAGAIIFALKNKLDITLGVALGSATQISMFVVPLSVLVAWIMGSKWILTSSC

SEQ ID NO: 53665 - protein, 491 aa, Oryza sativa
MFPSSVNMREQNNIIIISIAMTILLLVVFFCRMLGNMAGKNKRKKQPKLPPGPATMPVLGNIHQILMNKPVFRWIHRLLDEMDTEILCLRLGSVHVIAIASPEMAREALRRNDAVLTSRPVSFAWRAFSFGYKNTVGSTGDQWKKMRRMLASEILSSAMERRMLGQRVEEADHLVNYIYRNCNNGTVDIRHVTRHFCGNIIRKLVFGRRHFAFGAGNIGPGRDEEAHIDALFTALDYLGAFSISDYFPSLVLNGLMSTFRRLHDPIIMERMEEWRAPRRNGDERREVADFLDVLISLDDAQGKPLLSLDEVKAETLEIILNSVDNPSNAVEWALAEMVNNPKVMKKAVDELDMVVGKERLVEESDIHSLTYLKACIREAFRIHPYHPFNPSHVAIANITIAGFMIPKGSHIILSRIGLGRNPRARDNPLEFRPERHLKNTDNVVLAEPELRFLSFSAGRRGCPAVSLGTSITMMLWAEKLNTDVIKKHICN

SEQ ID NO: 53666 - protein, 333 aa, Oryza sativa
MHTTLASYAQDLAMPAAALDLLPDKAHQPSMAPSLHAWDSPNGAPTPMPKRLEGKVAIVTGGARGIGEAIVRLFVKHGAKVVIADIDDAAGEALAAALGPHVGFVRCDVSVEEDVERAVERAVARYGRLDVLCNNAGVLGRQTRAAKSILSFDAGEFDRVLRVNALGAALGMKHAALAMTQRRAGSIISVASVAGVLGGLGPHAYTASKHAIVGLTKNAACELGAHGIRVNCISPFGVATPMLINAWRQGHDASTADDADADIDLDIAVPSDQEVEKMEEVVRGLATLKGATLRPRDIAEAALFLASDDSRYISGHNLVVDGGVTTSRNLIGL

SEQ ID NO: 53667 - protein, 260 aa, Oryza sativa; identical to SEQ ID NO: 30772

SEQ ID NO: 53668 - protein, 552 aa, Oryza sativa
MAEAIASAGGIAMAASTSLTPGQVSALLGFLWVFTAWAYAEVLYYRKNAASIKAHSDVNLAVMDSSSNKGEDQVMLLEEGVQAPVQKPVYASLTSQMFRLFLLDQALILENRLTLRAISEFGGHLLYFYICDRTNLLGESAKNYSRDMFLFLYFLLIIVAAMTSFKVHQDKSSFTGKSILYLNRHQTEEWKGWMQVLFLMYHYFNAKEIYNAIRVFIAAYVWMTGFGNFSYYYVRKDFSLARFAQMMWRLNFFVAFCCIVLNNDYTLYYICPMHTLFTLMVYGALGILNKYNEIGSVMAIKFVACFLVVILIWEIPGVFEIVWSPFTFLLGYTDPSKPDLPRLHEWHFRSGLDRYIWIVGMIYAYYHPTVEKWMEKLEEAETKTKLYIKALIVSIALTAGCLWYEYIYKLDKITYNKYHPYTSWIPITVYICLRNFTQEFRCCSLTLFAWLGKITLETYISQFHIWLRSKVPNGQPKWLLTIIPNYPMLNFMLTTAIYVAVSHRLFELTNTLKIAFVPSRDNKRLSYNFVAGIAISVALYSLSFLIVGVAGY

SEQ ID NO: 53669 - protein, 386 aa, Oryza sativa
MMMMGEGVSSVPPWSHLPVSGVDVLGGGGGGGDEMTPYVIAALRDYLPANDVGVGADEEEEAAAMAAAVDAYACDEFRMYEFKVRRCARGRSHDWTECPFAHPGEKARRRDPRKYHYSGTACPDFRKGGCKRGDACEYAHGVFECWLHPARYRTQPCKDGTACRRRVCFFAHTPDQLRVLPAQQSSPRSVASSPLAESYDGSPLRRQAFESYLTKTIMSSSPTSTLMSPPKSPPSESPPLSPDGAAAIRRGSWPGVGSPVNDVLASFRQLRLNKVKSSPSGGWSYPSSSAVYGSPKAATGLYSLPTTPLASTATVTTASSFMPNLEPLDLGLIGDEEPVQRVESGRALREKVFERLSRDGAISGDATAFATAGVGLDVDWVSDLIN

SEQ ID NO: 53670 - protein, 453 aa, Oryza sativa
MATKVVDKLTVAASPPADGGVLPLTFFDVPWIFTGPVERVFLYTYPHAVEHLAAHLLPSLASSLSAALHRFYPLLGRVRPCSSGGGGGGYEFCSTGGDADRVELTVAESGDDFEELAGGGPMDVGRLYSLVPRLPRPEEGSSELAAVQVTVFPGKGLAVGVSIHHVACDDSSFMHFVKTWAANCRVASGGDVDAVPPPPPPFLDRGVVADPDGLAAKTLDQMRQLANSGPPPPPPSGPPPKLFMASFTLTRDSIDKLKQRVTASGGGGVHCSAFTVACAYAWTCLARVDATSAARERAHLLFSVECRRRLTPPVPQEYLGNCLRPCFVEVDTAGLLGSGADGVVTAAVAIGAAIRGLDDGVLDGADEWFQKIVSLMPHRPMSIGGSPRYGVYDTDFGLGRPAKVELLSIDKTPGTVSMAEARDGHGGIEIGVALPEADMARFSSCFADGLKQL

SEQ ID NO: 53671 - protein, 137 aa, Oryza sativa
MGTSMNRRSLLQAKGGCPVSFENQNYTTITSKCKSPWPADLCCPALNEFACNFSQYINDESTNCAESMWVYLNAHGSYPAGLFSNECAVLDCNGNNSTISTNQTANGSGTRGAKGISEMYSLVTTLIVSGLPVLLFY

SEQ ID NO: 53672 - protein, 588 aa, Oryza sativa
MSAAVGGAEFHGFRGGGGGAAQLQRSRMLGRPLRVATPHAAAPAGGGGSSSASIRAVSAPLKKDASEVKRSKVEIIKEKSNFLRYPLNEELVSEAPNINDSAVQLIKFHGSYQQTDRDVRGQKNYSFMLRTKNPCGKVPNQLYLAMDTLADEFGIGTLRLTTRQTFQLHGVLKKNLKTVISTVIKNMGSSLGACGDLNRNVLAPAAPYVRKDILFAQETAENIAALLTPQSGAYYDLWVDGEKIMSAEEPPEVTKARNDNTYGTNFPDSPEPIYGTQYLPRKFKIAVTVAGDNSVDILTNDIGVVVVSDSAGEPVGFNIYVGGGMGRTHRVETTFPRLADPLGYVPKEDILYAIKAIVVTQRENGRRDDRRYSRMKYLIDNWGIEKFRAEVEKYYGKKFEDSRPLPEWQFNSYLGWQEQGDGKLFYGVHVDNGRVAGQAKKTLREIIEKYNLEVSITPNQNLILCGIDQAWKDPITAALAQSGLLEPKDVDPLNITSMACPALPLCPLAQTEAERGILPILKRIRAVFDKVGIKDHESVVVRITGCPNGCARPYMAEVGFVGDGPNSYQIWLGGTPNQSTLAEKKMCL

SEQ ID NO: 53673 - protein, 434 aa, Oryza sativa
MAASAAASRAQRLSRIFSSSSPSVRPPKPGQVKEAPKPAPTKKAPAPGAEANPNLRRNAIDDIIKGLLRERDPDKLVSGFIAASSTHPRFRARHRVYDVAVSRLATFGRLDGVEAIIDAQKPFLETSKEGFAARLIRLYGHASMASHAAATFHDLPPQLKSTMTFNSLLAAYVEAGEFEALAAAFKEIPVSNPSVVPSVYSYNILLQALCKVPDLSAALDTMTLMEKSGISPDLVTFNTLLNGFYNHGDMDGAEKVWEMITERNMVPDAKNYNAKLRGLVAQGRIEDAVAVVEKMEKDGPKPDTISYNELIRGYCKDGRLEEAKKLFEDMAENGYVANRGTYHTLIPCLVKAGELDYALKCCHEIYGKNLRVDCFVLQEVVTALVTASRVEDATKIVELGWNNSYPRRILNIPHATEKNKEESISEEEEEPENA

SEQ ID NO: 53674 - protein, 371 aa, Oryza sativa
MIRRFLYIADHCFTGPSLSHRLRRVNPSHLLYPDGHPLATKPERATVEVEDARLPPPAMAFCSPGTTATAMGMEFMRRNDGSIVGIDHTGRAVLYDPAARAVRTLPALAAPKLMPVSAAVGDDLYVMETTPLPDGAGCFEALVRLEDNPAESDSDKWEVGDNYLWQPLPPPPPPPSPCVNAYAAGFEGSSRGMICGYAVAGDGDGGTRILVSTTTNGTYSFDTASSAWSKAGDWELPFRGRAEHVPEHGLWFGISDMDGTILGAWNLSSAFQQPQPPVASLQVKGFSVESHSDDRRRRELEVYASQVVHLGGGKLCVAKMFSVDRRERGEINFAMLTGVEVVRGRGGKLRVVKHKSRRYNFGQDYTPVYLL

SEQ ID NO: 53675 - protein, 310 aa, Oryza sativa
MVAAIRVPRSQRAKRELLKHAPKLVETGKKTLILHGTKTSAVLNSVLADLFHLKRDNAVKYSKKNDNIRPFESGGETSLEFFSLKTDCSLIVYGSHSKKRPNNLVLGRTYDHHIYDLVEVGVENYKSIESYVYDKKLAPKLGSKPFFAFIGEHFESVEELKHLKEVLLDLFKGEVVENLNLAGVDRVFVCTAISPTTVYMMHCALRLKRSGTSIPRIELVEVGPSMDLVVRRHRYPVESLKKEAMKTADHAKKMKNVTKDPVHGKLGKVYIPDQQIAKMSLSNDVKGLKRERREAKKNKDHSKKQKINPE

SEQ ID NO: 53676 - protein, 358 aa, Oryza sativa
MRHISSLLQGLARSLSVGKERKGGDGDDGKAAAATATAVLRTSGTLWGEGSETFAAVCSRRGEKGINQDCSIVCEGFGCEEGSVLCGIFDGHGQWGHYVAKAVRESLPPALLRRWREAVTLAALIDGGEKRLCECRPDLWRQSYLAACAAVDAELRASRRLDAVHSGCTALSLVKHGDLLVVANVGDSRAVLATASPDDGGGARLAAVQLTVDFKPNLPQERERIMECNGRVQCLADEPGVHRVWRPDREGPGLAMSRAFGDYCVKDYGVISAPEVSTAGSPPRTTSSSSPPTGCGTWCRTRRRCRSWRRRRRGRRRRSGSSSSPSGHGGASAGASPSTTARRSASSSTRRRPKQHTR

SEQ ID NO: 53677 - protein, 620 aa, Oryza sativa
MLEEANKILGRCRGLPLAIATIGGLLANRPKTSAEWKNLRIHLGSELEFDQDINSINRVITSSYDGLPYHLKSCFLYLSIFPENHEIRYTRLVRRWIAEGYIAKRRDMTVEEVGQKHYNDLMNRSMIRPMKKKIGASMAVERCQVHGMVLQIILSKSIEENQLFIIDKHCNEVPQSKIRHLVVTRWKRSEEKMATNINLSLVRSLTVFGECPASLISPKLRLLRVLDLENAVDLENDDLKHIGDLHHLRYLGLRGTNISRLPSSLQSLKCLETLDVQDTKVTHLPDGTAKLEKLRYLLAGINFAEDLAEKMQTNAKNKVNKCNGNLLETLADVVCRCRRGFSECCESSSSCFAGHFSVRAPEGIEKLRNLHMLGVVRIERDSGVAQKLGKLISLRRLGVDLDATGEEGKALCNSIQKLARLERLEVRSKSLLFLNDLNGLAPKHLLSLRLYGHLEKLPDWVSSLNDLAKVKLLETQLEQKDINLLGNLSNLTSLGLWGKSFAGVSLHFSRDMFKNLKSLHIQGLENLETLNFEKSAADRLEKLLVKKCFALSDNERGISDILFLKNIVEITLISKGDKPHLQKGLQRQVSEFELVNKRRPKLQIVNSMSGRSPRANTIVG

SEQ ID NO: 53678 - protein, 73 aa, Oryza sativa
MIAAIDDCGLMAYPFCYASNLESLSICISSVINPISKALFDLHSDLVIHNLLLALYHLGFENHIPFLLKRGHV

SEQ ID NO: 53679 - protein, 594 aa, Oryza sativa
MGSFLRKQPSFLLILLILHLGAREARALSSDGEALLAFKKAVTTSDGIFLNWREQDVDPCNWKGVGCDSHTKRVVCLILAYHKLVGPIPPEIGRLNQLQALSLQGNSLYGSLPPELGNCTKLQQLYLQGNYLSGHIPSEFGDLVELGTLDLSSNTLSGSIPPSLDKLAKLTSFNVSMNFLTGAIPSDGSLVNFNETSFIGNRGLCGKQINSVCKDALQSPSNGPLPPSADDFINRRNGKNSTRLVISAVATVGALLLVALMCFWGCFLYKNFGKKDIHGFRVELCGGSSIVMFHGDLPYSTKEILKKLETMDDENIIGVGGFGTVYKLAMDDGNVFALKRIMKTNEGLGQFFDRELEILGSVKHRYLVNLRGYCNSPSSKLLIYDYLPGGNLDEVLHEKSEQLDWDARINIILGAAKGLAYLHHDCSPRIIHRDIKSSNILLDGNFEARVSDFGLAKLLEDDKSHITTIVAGTFGYLAPEYMQSGRATEKTDVYSFGVLLLEILSGKRPTDASFIEKGLNIVGWLNFLVGENREREIVDPYCEGVQIETLDALLSLAKQCVSSLPEERPTMHRVVQMLESDVITPCPSDFYDSE

SEQ ID NO: 53680 - protein, 285 aa, Oryza sativa
MAGTSSSSNASTGGYSLMGYIKDIPTLKGDNYEEWKRELDLAFILGEVDWVLTTPCPIEPAEIFRGEKESDAEWQKRERDNASLIMSYDIEHAKWSSANKNCLAAVKNTIEPTILGSIPEYDTVSKYLESIKSQFSGSSKFYATQLIKQLVTERYHGDGVKDHILRMSNMASKLKQKDLGISDDFLVHLVLSSLPKNFDNLVVNYRISTENWNIEELISNCVQEERHKETNGDSINLVKDNKEKSHRSPSSKEKQPQHLPQKQQFTVETRSVSTLQEKTFQERSS

SEQ ID NO: 53681 - protein, 257 aa, Oryza sativa; identical to SEQ ID NO: 30221

SEQ ID NO: 53682 - protein, 118 aa, Oryza sativa
MAASDSSSLSRAQPHRTSRRSPPARRKDPFSPPKVHRSHKLLLEIEALMEVELEGGNALGGRHRWRKQIMTGGASPEPHQHGSSGREERTEAAALTGANHDGRSLSPVSAAADGEWTL

SEQ ID NO: 53683 - protein, 636 aa, Oryza sativa
MLDSGSYDDVDYGDLFSIPNPPAPHLLNFPLQFFPSNGFISSADDSHRSPAGMFGSTPSPTSTTTELENSEDLSESADDAVLAYINQFLLEDEEDESCPGTITSVEDSALLAVEKPFVDILTASQEACQENSWIDSCCDFTGNGGLLDTFTTTHAACQPAPCEFEKEKGECAVHKGRKNPHDDCLLLEEESRRSKQLAVSEEETVREMFDKVLLCNGECELRAPLPAEARNCGVYVKGSGNKRGRKKGKSGASAEDDAVDLTTLLIHCAQAAAIDDHRNSNELLKQIRQRSSAYGDAGQRLAHCFANALEARLAGTGSNIYRSLAAKRTSVYDILNAFKLYVTACPFKKISNFFSIEAILNASKGMTRLHIVDYGIQYGFQWPIFFQRISKRPGGPPSVRITGVDLPQPGFRPAQLIEATGRRLHDYARMFNVPFEYHAIAAKWDTIRVEDLKIDKDKDELLVVNCLFRMRNMMDEMVTDDSPRMQVLKTIREMNPNLFIHGVVNGTYNAPFFVTRFKEALFYYSSLFDMLETTASRVDENRLLIERDLFGREALNVVACEGTERVERPETYKQWQVRNIRAGFKQLPLNQETVKKARYKVKKSYHRDFLVDEDNKWMLQGWKGRIIFALSAWEPN

SEQ ID NO: 53684 - protein, 492 aa, Oryza sativa
MAASPAMATLLLLLLHAVLVAAADAGAADKEAYAATGSTAGKETAAAADKETSAAAGSTAGAVPDPNIFNKEAVCPKTTDEKACQQLVKVLPPEFAETKDAKGLAKLCISSVGFSAEQFTKDAIAAVQECKKPDKCLDSCVQASTAVTDALKPSGAGVNTVKVPEDEWLLAIHASFSQLLRGPAGGVSRPPLCKTCCDDGSCKDAKKLNVVSVFSRMWDFLDFTDAVLDDLYPLTKTTGTKATTTAGSTADKVAYAAKGSTEGKETAPAAESTVDKETSPAAESTVDMATSAAAGSTADKNAYPAAESTADKETSPAAESTADTATSAAAGPTADKETSPAAESTADTATSAAAGSTADKETSLAAEPTADTATSAVAGSTADKETSPAAEPTADTATSAAAGSTADKETSPAAESTVDTATSAAAGSTADKETSPAAESTVDKETSAVAGSTADKNTYPAAGSAAEKETSSAAGSAPVVDTAPAAPPTTYV

SEQ ID NO: 53685 - protein, 310 aa, Oryza sativa
MNRGEFQSSLVQQMIWSGSSTGTATGVGSGGGAGSLMGSLKPCHEDQEASPNMPSLSSPSLIFSQQFQHSSPGLVPMNGTAGAAASLPSLHDGGGGGHESSMPESWSQLLLGGLAGDQERYSATAALLSKGLENWGDHAAAAAASACMVGGMKEEGSMAQAAATAAAAAYSFYGSHLAGDHQHEIQAAAAGGGASNKSQLSQMLMASSPRSCITTSLGSNMLDFSNTAAPPELRSHHHNSDNSSECNSTATGSALKKARVQASSSAQSTLKVRKERLGDRITALHQIVSPLARLTQRLYCKRPLAISDSS

SEQ ID NO: 53686 - protein, 205 aa, Oryza sativa
MDNTPRFSGGGDDCELMQQKQEWAKTQDMLKSKLILEDDFGWNLPSMGSNSDQSNANNKGNLKYIGGVDISFSKEDPSTACAALVVLDAGTLEVVHEEFDVVRLQVPYIPGFLAFREAPILLGLLEKMKTNNQHFYPQVLMVDGNGLLHPRGFGLACHLGVLADLPTIGVGKNVLILLPLQLLLWKFSHLVVFRPFQVLDGFLMF

SEQ ID NO: 53687 - protein, 235 aa, Oryza sativa
MADEYGRGGYGRSGAGAGDDYESGGYNRSSSGGADEYGRRPGGGAGGYNKPGGTDDYDSGYNKSAGGDDDDYGRTGGGGYNKSGTDDDYDSGYNNRIEEGVAAAAALGSGGFAFHEHHDKKEAGAFAMYERRGEEEAPPLRLMIHRSIAPCMRRRRRHGRRPRARVRCGHGRVQLNKSRGFCTYGLSMCTPRIWYGCTYKRIVCTIPIKLSVALCLCVIKSMVCHACVVVYTLTS

SEQ ID NO: 53688 - protein, 90 aa, Oryza sativa
MPCRSAPGQHGRRPEAAPPPAFSPSPPPPRRRLSSRRQSRTAARTAAAGPSTPSNTLRLGPRRETGGGAATRRGGSGDADGQRQQSQRRC

SEQ ID NO: 53689 - protein, 177 aa, Oryza sativa
MAGADVDVGTELRLGLPGGGGGAAEAAAKAAKRGFEETIDLKLKLPTAGMEEAAAGKAEAPAAEKAKRPAEAAAADAEKPPAPKAQAVGWPPVRSFRRNIMTVQSVKSKKEEEADKQQQQPAANASGSNSSAFVKVSMDGAPYLRKVDLKMYNSYKDLSLALQKMFGTFTRNWEQYE

SEQ ID NO: 53690 - protein, 157 aa, Oryza sativa
MRSTVSNQGNDREIEISETKGSCTRHLCNISVPLTGSHKHKWMGPAIRMSLPSFSGQIEDHPDLLKYSCQVECRVRPVRPAKIWRPRITEPQECPDGKISSKGSEVLAEPDAQKHTVMVLLSKPILALEFNSLEMHVDAPKIVIPHSKKKEVRYSST

SEQ ID NO: 53691 - protein, 501 aa, Oryza sativa
MNRGGGVGVGDESGSDYESGGGMRKPLLMHTGSWYRMGSRQGSLTGAGTSSMAILRESHVSAFLCTLIVALGPIQFGFTGGFSSPTQDAIIRDLDLTLSEFSVFGSLSNVGAMVGAIASGQMAEYIGRKGSLMIAAIPNIIGWLAISFAKDSSFLYMGRLLEGFGVGVISYTVPVYIAEISPQNMRGALGSVNQLSVTVGILLAYLLGMFVPWRLLAVIGILPCTVLIPGLFFIPESPRWLAKMNMMDDFETSLQVLRGFETDISAEVNDIKRAVASANKRTTIRFQELNQKKYRTPLILGIGLLVLQQLSGINGILFYAGSIFKAAGLTNSDLATCALGAIQVLATGVTTWLLDRAGRRILLIISSAGMTLSLLAVAVVFFLKDSISQDSHMYYTLSMISLVALVAFVIAFSFGMGAIPWIIMSEILPVSIKSLAGSFATLANWLTSFGITMTANLMLSWSAGGTFVSYMVVSAFTLVFVILWVPETKGRTLEEIQWSFR

SEQ ID NO: 53692 - protein, 111 aa, Oryza sativa; identical to SEQ ID NO: 29462

SEQ ID NO: 53693 - protein, 375 aa, Oryza sativa
MDPLAVLRDYAARGDLDKIIFSGDEVLFGSEYTFPANAPTAFTNKQSGRPYPLSAAVFLAQHNDLKHTDFIQAARLRRIPPVSLPDRKTFLDFLRHGHHSLPTDPLLPSALPSFAPEPQPAMPEEPEGDKASGAYIRALERTLKDRNALLDARGRDFLAVLQNATRREEERRRNKDSAPSSARHEPSSAAAAAAMAKPKVERSFGDGFVPIILVPSASQTLITIYNVREFLEDGVFVPSDERMRAMKGSGKPECVMVQKKLIRGERAGAGGGATTFEVRDKPASLKADDWARVVAVFVLGKEWQFKDWPFKDHVEIFNKVIGFYVRFEDDSVEAAKVVKQWNVKIISISKNKRHQDRTAALEVWERLEEFMRAHT

SEQ ID NO: 53694 - protein, 392 aa, Oryza sativa
MLTFMELAGPTEGDGGGSVDSQLWAACAGSMSSVPPVGAAVYYFPQGHAEQASAAVDLSSARVPPLVPCRVVAVRFMADAESDEVFAKIRLVPLRPGDAVVDVGEAAAAEARREEENSRPRPTSFAKTLTQSDANNGGGFSVPRFCAETIFPELDYSREPPVQSVCAKDVHGVEWTFRHIYRGTPRRHLLTTGWSPFVNKKQLTAGDSIVFMRDEGGNIHVGLRRAKRGFCSIGGDDESLSSIPGWDQYRGLMRRNATATATGGRTPPKGKVPPENVLTAATRATTGQPFEVLYYPRASTPEFCVRAAAVRTAMAVQWCPGMRFKMAFETEDSSRISWFMGTVAGVQASDPVRWPQSPWRLLQVHLHGTNMRQPQLDHDRVVEFLINWPPRR

SEQ ID NO: 53695 - protein, 438 aa, Oryza sativa; identical to SEQ ID NO: 53229

SEQ ID NO: 53696 - protein, 102 aa, Oryza sativa
MNTDITASVKPEYPVVDRNPPFTKVVGNFSALDYLRLSTISAVSVTVGYLSGIKPGIRGPSMVTGGLIGVMGGFMYAYQNSAGRLMGFFPNDSEVARYKYKL

SEQ ID NO: 53697 - protein, 103 aa, Oryza sativa
MHAASRDVLEHLQGNLGLRDGDLEASRAALHRFGNTSSSSIWYELAYLEAKGRVRRGDRVWQLAFGSGFKCNSAVWRAVRRVRRPARSPWLDCVEQYPARMNA

SEQ ID NO: 53698 - protein, 303 aa, Oryza sativa
MIALSFVRKGSDLVEVRKVLGKHAKSIMLMSKVENQEGVANFDDILAQSDAFMVARGDLGMEIPIEKIFYAQKVMIFKCNIQGKPVVTATQMLESMIRSPRPTRAEATDVANAVLDGTDCVMLSGETAAGAYPELAVRTMAKICLQAESCVDHAAVFKSITASAPIPMSPLESLASSAVRTANSAKAALILVLTRGGTTARLVAKYRPSMPILSVVVPELKQTDSFDWTCSDEAPARHSLIVRGVIPMLSAATAKAFDNEATEEALGFAISNAKAMGLCNSGESVVALHRIGTASVIKLLTAN

SEQ ID NO: 53699 - protein, 199 aa, Oryza sativa; identical to SEQ ID NO: 30673

SEQ ID NO: 53700 - protein, 118 aa, Oryza sativa
MWSVASLVRQGLRWRRRRRRRTARVVDESALAAADGGDAAAPAGGGGDAAAVAVVPMASVGAALARALLALACTIRFDGEDGGAGATEEAWAASGWRPRADEVSHLMVRESMRYAIYA

SEQ ID NO: 53701 - protein, 626 aa, Oryza sativa
MDVESRQGPKGGDTMAASEVSVDWRGRPCGSRKHGGMKAAVFVLGIQAFEMMAIAAVGNNLITYVFNEMHYPLSKSANIVTNFIGTVFLLSLLGGFLSDSYLGSFWTMLIFGFVELSGFILLAVQAHLPQLRPPACDMMAAAAAEGGCEEASGVKAGIFFAALYLVALGSGCLKPNIIAHGADQFRRGGGGGGDGDGDDGGDGKRLSSYFNAAYFSFCVGELVALTVLVWVQTRSGMDVGFGVSAAAMAVGLVSLVAGVFFYRNKPPQGSIFMPIAKVFVAAVTKRKQVCPSSSSTTAASHAVIPATGAAPVHRINKFRFLDKACVKVQDGHGGGGDGGKESVWPPCTPAEVEQVKVLLCVVPIFACTIVFNTILAQLQTFSVQQGSAMDTRIGGGGGGAAFHIPPASLQAIPYLVLIALVPAYEACFVPAMRRATGVDTGITPLQRIGVGLFAVTFSMVAAALVEAHRRRHAGDGLLSIFWIAPQFLVFGVSEMFTAVGLIEFFYKQSLSGMQAFLTSMTYCSYSFGFYLSSLLVSLVNKVTSGDGAGAGGGGWLSDNDLNKDRLDLFYWLLAGLSLLNFFNYLFWSRWYSKSVETTVQVAGVGGEGGGGEQQEEKGVDEVNMGH

SEQ ID NO: 53702 - protein, 89 aa, Oryza sativa
MVKLLASYSKDVREVVLENSPRNEKYTSSDVQKEILSIIAQKVQKSVREEIGNSKYCIMVDEARDKSKKEQMAIVLRFVNKGLIRTLLH

SEQ ID NO: 53703 - protein, 48 aa, Oryza sativa
MRSSTAAAPPPLLPSRLRRRPSRQRPSAPSSSPTPPTRPWCSASTARS

SEQ ID NO: 53704 - protein, 297 aa, Oryza sativa
MAYRLLELTLVSASDLKKVTLFSRMHVYAVASISGSNVPMPMHGTHADRNGGSNPAWNTVLHFPVPARFDTRGLALHVQLRARRSFGGHRDVGDVFVPLDDLLAGAHDGGEPRPASYQVRRPMSARAHGTLYFCYRFTDVKHPALEAIEAATATATSSATKQGQYVPMYAQDSDEKATEKSVSSPVTAYPPPSNAVVAHPPVVPYGAPYGGGYPPHQQQYGYAGQPPYAYNAGPPPPATYSYAAAQQPAARKGGRMGMGLGLGLLGGAVGGMMLGEMVGDMEADAAYDAGFNDALEF

SEQ ID NO: 53705 - protein, 50 aa, Oryza sativa
MEWNIKQPLHIALHYLDELSSSIILLFLISVAHVFHQAPLLLSGYMKWSY

SEQ ID NO: 53706 - protein, 673 aa, Oryza sativa
MQEKCNKNATKNAWEEVLRNQIWSKMGLPEELNKAIYLSYEDLSHNLKQCFVYYSLFPKDEIIGIDKIVSMWIAEGFIGKDGYSAQSAGLDYYKELIKRNLLEPQNDYYNEEHCIMHDVVHSFAQHVARDEALVLRDPQNNGILSSSKFRRLSISAEQIEWSNLQNQHCLRTLILFGNIKLKPGDSLRILPSLRTIHVRSSNFSILQDSLCHLKHLRYLELRYTDISELPRNIGRMKFLEHIGVRGCHRLSKLPSSIIKLDNLRHLSIDETKIRAIPRGFSRLLNLDVLWGFPVHGVAQGTAKHYCTLEDVGPVSQLRKLKLKGLENAPSKSAALAELGTKSRLTCLELWCSNDETKDAIVTVEQEQIKELFDLLRPAECLEELTIGGYYGDTVPDWIKMPEAAIFKDLRRLNLQNLVSCIQLPDGLGQLPNLDFFVVDDAPCIKQIGHCLLFEQGQRNMDNKKSSRHVAFPKLHELHLKGMMEWNEWTWEKHVEAMPVLSVLHVKDCNLSHLPPGLPYQARALKRLCVINARNLNSVEGFSSVIKLEVYGNPNLERIVDLPSLQNLTIVNCPKLMLLDGVASVQIMELGDHGMETLPEYLRHLTLRHLKIVCSLNLLRLMSTKHDASRSEWEKISHIMHVEGFASDNGDGILRWYMSYTRDPYNLETNITSR

SEQ ID NO: 53707 - protein, 63 aa, Oryza sativa
MYVQQHHFNQSSFYLHTRGMTLLSRYSICSGCGVFTESVHYLPGWRKTSDSTISGLGAQNLFL

SEQ ID NO: 53708 - protein, 466 aa, Oryza sativa
MAMHAIDGIPKNCQILHVEQEVVGDDTTALQCVLNADIERVQLLQEEAHLVQRQKDLEYEAEFEQSASKSKDGLDKDAISKRLEEIYKRLEFIDADAAEARAASILAGLSFTPEMQRKRTKQFSGGWRMRIALARALFIEPDLLLLDEPTNHLDLHAVLWLETYLLKWPKTFIVVSHAREFLNTVVTDILHLHGQKLHAYKGDYDTFERTREEHLKNQQKAFETNEKARSHMQAFIDKFRYNAKRASLVQSRIKALERMEHVDAVVSDPDYKFEFPTPDDRPGPPIISFSDASFGYPGGPTLFKNLNFGIDLDSRIAMVGPNGIGKSTILKLISGDLQPTSGTVFRSPKVRMAVFNQHHVDGLDLTVNPLLYMMRCYPGVPEQKLRAHLGSFGVTGNLALQPMYTLSGGQKSRVAFAKITFKKPHIILLDEPSNHLDLDAVEALIQGLLVFQGGVLMVKLRSFILV

SEQ ID NO: 53709 - protein, 288 aa, Oryza sativa
MPSRLCLNSVHNTRGIINQSDATSNKSGRWETSSCAMESLYDIDLISRTVPVVLDNPQSWYAIVSRSTKLGEEGDVAHAQGVSRQELKENTLYSKAFLINRTASPLAWFMECKDRTKRSSVMLPYNFLPSMPARKLRDAANKIKVILGDYDAIHVRRGDLLKNRKDRFGVERSLHPHLDRDTHPENIKRRIAKWIPRGRTLFIASNERTPGFFSPLSDRYKLAYSSNFSSILEPVIDNNYQLFMVERLIMQGARKFVKTMKEFDNDLSLCDDPKKNTKVWEEAVYTDG

SEQ ID NO: 53710 - protein, 185 aa, Oryza sativa
MADGPGSPGGGGGSHESGSPRGGGGGGGGGGGGGGVREQDRFLPIANISRIMKKAIPANGKIAKDAKETVQECVSEFISFITSEASDKCQREKRKTINGDDLLWAMATLGFEDYIEPLKVYLQKYREMEGDSKLTAKAGDGSVKKDVLGSHGGSSSSAQGMGQQAAYNQGMGYMQPQYHNGDVSN

SEQ ID NO: 53711 - protein, 352 aa, Oryza sativa
MASSAPSAAAGATPPDPLRRDRILSSKLYLDVPGSKAPVVYSPAYDIAFLGIEKLHPFDSSKWGRICKFLTKEGHLEKNRVVEPLEATKDDLLVVHSESYLNSLKSSLKVASIVELPPVAFIPNWLVQQKLLYPFRKQVGGSILSAKLALERGWAINVGGGFHHCSAEQGGGFCAYADISLCIQFAFVRLNISRVMIIDLDAHQGNGHEKDFANDGRVYTLDMYNAGIYPYDHVAKRYIDQKVELVSGTKTEDYLDQLDKALKVAESRFQPQLIVYNAGTDILDGDPLGRLKISPQGVVIRDEKVFRFAKDQSIPLLMLTSGGYMKSSARVIADSIINLSNKNLIELGSQLG

SEQ ID NO: 53712 - protein, 758 aa, Oryza sativa
MDALAGRLAAASVSDHPSSSSAAATDGANADHLLHVMRAVEGAEATIRNQLEENNRLKEELMQKTRQLQRIREDAASQASSSGVAQDRRSFVATKMDASRSPASAASSDNSRTPSALHHNGAFESGEPSMQQTIRQNNALSNGASKRSSGEQPALDSAAVSQFSTPSSHSLSPTRHRKEGEHDPRLNLAGQGLLPASEMASNMSWKHDLTAKIKENEEEIAQLRKHLADYSLKQARILDDKYMLERRIAQMRMAFDQQQQDLIDAASKALSYRQDIIEENIRLAYAVQAAQQERTTFISSLLPLLSEYENLQPSVLDAQSIVSNLKVLFKHLQEQLIITEEKLKESRYQITPWQTELANDATLPVHSPTDPLGKALVTSNKSNLDIVTQTPYPHIQSPMSSPVQVRGDWGVAGNKNRQVIPTDVPPRNVDHGDMGRNSLSSRRDVSSQVSQHDPHSVPLDFEPENQNPPFKHLSRSDVSDASEGAEVQHAREHSAHWGHGDSVNLVSGIEDTNPSYPYLPTVLEEPGSSFSEAAEDDPLPGIEGLRITGEAFPGRELQASGYSTNGTTSCNFEWVRHLEDGSVNFIEGARQPNYLVTADDVDTLLAIEVQPLGDRKRKGEIVRFYANDQRKITCDPETKELIKRTLETGHVSYEVQLPVKFLDMWEPAILAIKREGYSIKCTGQRGVVLTEKFQQATSINIPYGRPTEFLITSADGVEYNLKPAENALPRDTIVLVLRLFRIMAVEKRRGRKKSLFFK

SEQ ID NO: 53713 - protein, 752 aa, Oryza sativa
MEQPRLELSSLGGHRSSENPESRDEKTEEEVDDCPIEEVRLTVPITDDPALPALTFRTWLLGLISCAMLAFSNQFFGYRQNPLYISSLSVQIVVLPLGKLMAACLPKKVFRVKGTAWSFSLNPGPFNLKEHVLITIFANTGSNSVYAVGIITIVKAFYRREIHPLAAMLLTQTTQLMGYGWAGLFRKFLVDSPYMWWPSNLVQVSLFRALHEKEKRPKGGTTRLQFFLTVLITSFAYYIVPNYLFPTISTISVVCLVWKKSVTAQQIGSGVYGLGVGSFGLDWATVAGFLGTPLSTPAFAIVNIMAGFFLIVYVIVPAAYWADAYGAKRFPIISSHVFSANGSRYDVNQVLDTATFEFSQAGYDAAGKINLSIFFAFTYGLSFATLAATLSHVALFHGGSIWRQTKAAVSGQGGDVHTRLMKRNYAAVPQWWFQVMLVAVLGLSVFTCEGFGQQLQLPYWGVLLAAGLAFFFTLPIGIITATTNQQPGLNVITELIIGYLYPGRPLANVAFKTYGYISMSQAIMFLQDFKLGHYMKIPPRSMFIVQLVGTVLASSVYFGTSWWLLESVSNICDPAKLPEGSPWTCPGDDVFFNASIIWGVVGPLRMFGRLGLYAKMNYFFLAGALAPVPVWALSRAFPGRAWIGLVNMPVLLGATGMMPPARSVNYLMWGAVGLAFNYVVYRRYKGWWARHNYVLSAGLDAGVAFMGILSYAVLQSRGINGVNWWGLQVDDHCALARCPTAPGVSAPGCPVQ

SEQ ID NO: 53714 - protein, 273 aa, Oryza sativa; identical to SEQ ID NO: 30563

SEQ ID NO: 53715 - protein, 229 aa, Oryza sativa; identical to SEQ ID NO: 30050

SEQ ID NO: 53716 - protein, 126 aa, Oryza sativa
MARCLLPLHIPLPWRQSRRRCSLPLSSPASWPPAPPPVLTSPQRRPPPASPPTPAAPPPSHTAPLSPFESTSTTRSSPFHSCRCSPVAGATSPSGSGGIPFAIYPSLLPTAHPFPLSSNTRSQAVP

SEQ ID NO: 53717 - protein, 124 aa, Oryza sativa
MRILNEFRCIAALTLTTVGEQPLPRRHPAAPGAPEGGQGGGRCPARIHGGGRRRDAGAGLHRLPGVAGDGRLWAGIPSDQERSYEGPGATWGAQDHEKPTRGAPKMYPVCTSLSVQERRCKPII

SEQ ID NO: 53718 - protein, 147 aa, Oryza sativa
MLPLSLLKTAQGHPMLVELKNGETYNGHLVNCDTWMNIHLREVICTSKDGDKFWRMPECYIRGNTIKYLRVPDEVIDKVQEETSKSRSDRRPPGVGRGRGRGDIGTKPGGRGIGRGQDDGGSKGGGGRGRGGIGGKGGIKGGGRGRG

SEQ ID NO: 53719 - protein, 391 aa, Oryza sativa
MADGSLRGGVNKEGIKYYNNLINELLSKGVQPFITLFHWDSPQALEDKYNGFLSPNIINDFKDYAEICFKEFGDRVKNWITFNEPWTFCSNGYATGLFAPGRCSPWEKGNCSVGDSGREPYTACHHQLLAHAETVRLYKAKYQALQKGKIGITLVSHWFVPFSRSKSNDDAAKRAIDFMFGWFMDPLIRGDYPLSMRGLVGNRLPQFTKEQSKLVKGAFDFIGLNYYTANYADNLPPSNGLNNSYTTDSRANLTGVRNGIPIGPQAASPWLYVYPQGFRDLLLYVKENYGNPTVYITENGVDEFNNKTLPLQEALKDDARIEYYHKHLLSLLSAIRDGANVKGYFAWSLLDNFEWSNGYTVRFGINFVDYNDGRKRYPKNSAHWFKKFLLK

SEQ ID NO: 53720 - protein, 487 aa, Oryza sativa
MISAISWVPRGAAKLVPVEAEPPTQEEIDEAIKAIAQHTEGGSDADEDADDGEENGNMEVDAAADEEEEEVDEVAQAKAAAKALAKGAVDDVADELKELNMDNYDEEEEGLEIFSSGQGDLYYASNDLDPYLKNNDEDDDDEEIEDMTIKPTDLMVVCAYNEDDVNSLQVNLLEETEDGDLNMFVHHEVPLADFPLCTAWMDFNLKGGDKGNFVAVGTMDPAIEIWDLDIVDEVQPHMVLGGHSKKKKKVKGKKAKKYKKGSHRSSVLGLAWNKEVRNVLASASADKTVKIWDVSVGKCAVTLEHHDDKVQSVAWSRQSPEVLLSGSFDKSVAMNDMKDGGQSCNKWSVEADVESLAWDPHNEHSFMVSLENGMVQAFDKRTASSNSNSGRPTFTLHAHEKAVSSISFSPSTPNFLATGSTDKMVKLWDLSNNQPSCIASLNPKLGAIFSVSFSNDSPFLLASGGSKGKLKVWNTLTEPAVANKFGK

SEQ ID NO: 53721 - protein, 913 aa, Oryza sativa
MLQYLDFSHASTSRKWSHKKQGEGTVIHGFEAPRNSMEFTLEAPQSYGVFQEDVPYSCNMRQQYPKAGLNHSSSPIKRIIHEDVSFRTNEVQKRPSVIARLMGMDSPPMSTTAGELAAGHTEEKRQDMITSTRPMPRRDPSEMVSTKHVSFVQHKGSMKHSPKQAEVCAYDDSMELFGQLSKAISSSEWAKPQPREHPQEEELQKFKKDFEAWQASRMWEQSRALELESHLDDDDVRCTDIVPYRFQHRGKDNAGKKHTHSNGDAHWRRSKESGTGTGTSISGSRTFSLTSADASSTRLPLSRFYYEEERLLSPKKIVILKPCPEMSTDDIEESSLGSPEMVKKENNMEAFLEEVKKRLKVELEGRMASDDRAADRWAAGGDIPADPKQIARSIANQIRETVTKDLHSALLRSESTRSYRSDIPLNGQSQMDYICRDARKHLSDRLKNVLRREPETEPPALSHRRRTASASFNEEPRPKPRHEVARKGKIRSKEEKKHAIEFDVRSFRRGHHKASPTPAIDSDPVSPRNLIRSFSAPVSGTTFVKLLSEEPRVLTGARLQRKQEGYGSRPPPPSSEEERKGRKDTFNIKGRVSNLRQNLGLRAKLFGKKLHSADESPFPDDLPPIGTLVTAPSVLIHPGVLQENSTEVPPSPASWCSSPPDEMSRGGYPSPVSPLEASFSEHRSPLKMAARDMSSSASEPEHPSSEQAQTDQELAETSPIQDDDDDDTDEIDNPIKAYIRAILVIAGLYGQRRSSDQLFSDREVKPIPAWVFEEVESSSSSSAPATTDCDAAATGVDHRLLFDLINESLPRVVQSSTTLCAFSRWYGAAPRRSPGGKRLLDGLWNTVQAWLAPPPPTDSPNSVDELIGRDMSMSPWNGPFREDVGAAGAEMEAEILDELVDETLWDVLLNVGD

SEQ ID NO: 53722 - protein, 131 aa, Oryza sativa
MAAAALRPAILRRIRLSPSPAAAAGAAAASQPHALARWLARPMSSHDAHLTRDEVVDRLLDVLKCHPKVDPSKVSPEAHFEKDLGLDSLDTVEVVMAIEEEFKLEIPDQEADKIDSLPLAIEYVANHPMAA

SEQ ID NO: 53723 - protein, 211 aa, Oryza sativa; identical to SEQ ID NO: 31812

SEQ ID NO: 53724 - protein, 120 aa, Oryza sativa
MWEMMTAHLIQNHENIKRGEDDKFSLAFARIENHYFVNKGFLPSDSHLLDNVDMIRHIKAFIVQGRYDVCCPMMSAWDLHKAWPEAEFKMVPDAGHSANEVGVAAELVSANEKLKSMFTK

SEQ ID NO: 53725 - protein, 562 aa, Oryza sativa
MERQSSSRLGALEKLKSFRGIEKQRSFKFLSMEKQQSFKRNKDSPGKRGDTELHLAARAGSVPHVQKIFAASDPELVGELAARQNQDGETALYVSAEKGHTEVVSEILKFCDLQSAGLKATNSFDAFHIAAKQGHLDVLKELLQAFPALAMTTNSVNATALDTAATQGHIDIVNLLLETDASLARIARNNGKTVLHSAARMGHVEVVTALLNKDPGIGFRTDKKGQTALHMASKGQNAEILLELLKPDLSVIHVEDNKGNRALHVATRKGNTVIVQTLISVKEIVINAVNRAGETAFAIAEKLGNEELSNILREVGGETAKEQVNPPNSAKQLKKTVSDIRHDVQSGIKQTRQTKMQFQKIKKRIQKLHIGGLNNAINSNTVVAVLIATVAFAAIFTIPGNFLEDMKDPHDPNMTLGQAFVASNPAFIIFLVFDALALFISLAVVVVQTSLIVVEQKAKKKMVFVMNKLMWMACLCISAAFIALTYVVVGRDDRWLAWCTMAIGTAIMLATLGSMCYCIIAHRMEEKNMKKIRRSSTSQSWSISVDSDTELLNNEYKKIYAL

SEQ ID NO: 53726 - protein, 491 aa, Oryza sativa
MGCFPCFGSGGKGEAKKGGGGRKDGGSADRRVARVGSDKSKSQGGLDSRKDAFIPRDANGQPIAAHTFTFRELAAATKNFRQDCLLGEGGFGRVYKGHLENGQAVAVKQLDRNGLQGNREFLVEVLMLSLLHHDNLVNLIGYCADGDQRLLVYEFMPLGSLEDHLHDIPPDKEPLDWNTRMKIAAGAAKGLEFLHDKANPPVIYRDFKSSNILLGEGYHPKLSDFGLAKLGPVGDKTHVSTRVMGTYGYCAPEYAMTGQLTVKSDVYSFGVVFLELITGRKAIDNTKPLGEQNLVAWARPMFKDRRKFPKMADPLLAGRFPMRGLYQALAVAAMCLQEQAATRPFIGDVVTALSYLASQTYDPNTPVQHSRSNASTPRARNRVGANFDQRRLHSPNHQQSPDLRKEGTTTSKYEAEVSRTNSGSGSGRRAGLDSMDVTGSQMGSPAHAGRKRESSRSTDRQRAVAEAKTWGENSRERKWPNARGSFDSTNE

SEQ ID NO: 53727 - protein, 224 aa, Oryza sativa
MQFPFAAGDYPADQVDPDYLYFLSHIRPDGDSYTLELPSDGVSPPSLVKYEAPADTGSTDGECVSDPSPGRASTNRPPEEKESSVEVDAEPPAPSWIDSLVDIDEDYRLFLKHTRVVNDNMVLEIDGAVVTYPCAASSESSSEVEDAREKEVAMDSDEPVVILPDPKVCDWVAVGDASVRTLDSKKKRKMSSSNSNNAGPSIPPVRIFYTSPIVVTCGTVVSLN

SEQ ID NO: 53728 - protein, 368 aa, Oryza sativa
MGVGKHIASETFTVGGYQWAIYFYPDGKNPEDNSAYVSVFIALASEGTDVRALFELTLLDQSGKAKHKVHSHFDRSLESGPYTLKYRGSMWGYKRFFRRTALETSDFLKDDCLKINCTVGVVVSTMDYSKPHSIHVPESDIGYHFGTLLDNQEGVDVICNVAGEKFHAHQLVLAARSSFFRSELFEHESDEEKNEVDTSNEIKEIVIDDMEPKVFKAVLHFMYRDNLVGDDELSASSSDCSIFDTLAGKLLAAADRYELPRLRLLCESYLCKHISVNSVATTLALADRHHAMELKSVCLKFAAENLSAVIRTDGFDYLKDNCPALQSEILRTVAGCEEECSSGGKSQSVWGQLSDGGDTSGRRVRPRV

SEQ ID NO: 53729 - protein, 71 aa, Oryza sativa
MPSEKRAAVAGCFLVGIEGVMQGLLISIYDDDVYSKHGFLAQELFTLPPGVTIMQARLRKALEWKTKRTAL

SEQ ID NO: 53730 - protein, 353 aa, Oryza sativa
MATECDVNKSRRFDLGMSRRTRRSTSLITCYQDQQVQPLVQQLRQDAKLKTLFQCQDTELQPPCPYEDQELRILQAPLQCEVDAQETLNQHRDEQEEKLHHYLDEEHEKKLQDHLDEEPEKKLHHYLDEEQEKKLQDHLDEEPEKKLHHYLDEEQEKLFQDQDEEEKTPKQYLDEDQKTLQQCQDEEKAPNQYEDEDNTTGQYQDGEQKTAEQCEEEKTSEKYHNEEHKSLEAQQQCQDTKQKAQEQRKTVKKPITPPFADDVPRFSLQDLIQEKQLLIVGEAKATSKLGNGEKAIIADHKLPVPPAAGGATLAMVIKRPDGGKKSMGVIRRCVKALNQMVKAKHGSKKNKPF

SEQ ID NO: 53731 - protein, 306 aa, Oryza sativa
MAMVQYVTGYLCLSLALLLLTLVLHKVARKATGNGAGKPRLPPGPWRLPVIGNLHQVAMGGPLVHRTMADLARRHDAPLMSLRLGELRVVVASSADAAREITKTHDVAFATRPWSSTIRVMMSDGVGLVFAPYGALWRQLRKIAVVELLSARRVQSFRRIREDEVCRLVAAVAAAQPGEAVNVSERITALISDSAVRTIMGDRFEKRDEFLGGSRRGGQDSLRVQPRRPVPVVEAGQLRRRHDAAGGGEPPQELRADRVRSQAARGAEGRRRRGRRRGPRRCASQGSEGREPPSAPHHGQYQSRYP

SEQ ID NO: 53732 - protein, 217 aa, Oryza sativa
MAAAATAADAGSDPSAALAAAAATSTCAHCQREIPSSNIDLHSAHCARNLQKCEHCGEMVARKLMDEHYNESHAPVNCTLCKEIVTREIWDLHKSEQCPQRIVACEYCEFELPAVELHEHQDVCGNRTEFCQTCKKYVRLREWIGHEIQCHANANANASAQTSSARIIPEREVRPPPPVRPPRPMHGAQHKRLLFTIAVTGIAVMIGSILFQREESF

SEQ ID NO: 53733 - protein, 69 aa, Oryza sativa
MGVQQLGGAGGGRGGGRRSRRGRREAPPRLAHRCADEGLRAPLRVDAIKGSHSTVSCMAQVRAWNTPIW

SEQ ID NO: 53734 - protein, 558 aa, Oryza sativa
MAGSEAAAAQEAEMDPDFSGGGGGGPSFEFAFNSVNFSDRVLRIEVVAGDDDDDDDHAPGSSRDGGAGSLSDWARHRKRRREELLKEKESEAVMPDQINCKVEPEECDAYEENQEEPVAMMDDSPPSVGPDGDDGPSMDSPWSGGVSTPVLRVKNIYISSAILAAKSPFFFKLFSNGMKESDERQATLRITDSEENALMELLSFMYSGKLTSTDPTLLLDILMAADKFEVISCMRYCSQLLTSLTMTTESALLYLDLPCSISMAAAVQPLTDAAKEYLSNKYKDLTKFQDEVMNIPLAGIEAILSSNDLQVASEDAIYDFLIRWARAQYPKSEERREILSSRLLPLVRFSHMTCRKLRKVLICTDLDHEQATKCVTEALLYKADAPHRQRALAADVTTCQKFAERAYKYRPLKVVEFDRPYPQCIAYLDLKREECSRLFPSGRMYSQAFHLAGQGFFLSAHCNMEQQSTFYCFGLFLGMQEKGSMSVTVDYEFAARTRPSGEFVSKYKGNYTFTGGKAVGYRNLFAIPWSTFMADDSLFFLDGVLHLRAELTIKQPTV

SEQ ID NO: 53735 - protein, 422 aa, Oryza sativa
MQSLSRSTLLGLVRRLRLSSPPSPAPQPRRLLLTASPPPPPPPTTTVCCSRPAAAPGRDARTMAVALAASPDRSMGRESRFRHGWRSLTSSSEEKGALKDVPAAAMLKNRNDNEKKRSRRRKPGITILKNSGHRDGSIFKGNRGWKIDFRIANPDETQFEAMMLSDPGDCKPDEIACVMHQPCPMLQIFSLKLAKTSIDRFPVELYGYIAVRDLMDPLRNYVVRRSRDDTIAVKPGSLIGMTGPKRGIKFCSSALIEYDMRIKTGEQEEDDIQLIDGVLGIFDDLSKPSCKPFRSRIDGVGGAVDITVGLLPSAVEAIFEVSISEVQSCFDLTVCSYAGGLSQQFKIFQGTIGESCGLRRSVVAVMLDGMLHLRFIARRKGSKRDHEIACSIRAKKHGSSTHQLNTELASFLVKVNWSTLPM

SEQ ID NO: 53736 - protein, 455 aa, Oryza sativa
MDFQVVVLAGGTSEKLSPLVSKDVPKALLPVANRPVLSYVLDLLEASDLKDIIVVVEGQEAARLVGAWASSAYLDRLLVEVVAVPEDIGTAGALRAISKRLTANDVLVISGDLVTDVLPGAVAATHRRNGAAVTALLCSVPISGPSDAASSGGKDKAKKPTRLNIVGLDITRQFLLHIVSGTDVGKDVRVYKRKIRAVGEMEIRSDLMDAHLYAFKRTTLQNILEEKESYRSIRLEVLPYLVRSQLKSSSSGGEGTTVDETGDTTVPSNSHLQCLSQHRILAPSAFKKDLLSSGGTYRCCVYIATKSKYCHRLNSIQAYCDINRDVVGDASHLSGYSFSAQNNIIHPTSVLGSKTTIGPQCMLAEGSQLGDKCSVKRSVIGRHCRIGSNVKIVNSVVMNHVVIEDGCHIQGSVICNNVQLQERAVLKDCQVGAGYIVTASSEHKAESLSKKVERF

SEQ ID NO: 53737 - protein, 363 aa, Oryza sativa
MGWWLGGGLPVIAMLALNVVAAVLVSLVKVAMDGGLNPLVLVTLQQLTAAIFLGPIAYFKERKSRPKLTLEIFTYLFVSAALGAALRQYMIFVALRYTTATFVTAISNIAPVLTFLLAILTRSESLNLRRKTGIAKLVGTLISVAGAMVLTFYKGVAVTHTTKIHHATAAAAVAAEAAMSSRNWTLGTVAILGNCVCLSCWFLLHSRLAKKYPHVYSCNAFMCMFSFLQVAVVGLSTQRNVSVWIVRTKFHILTILYAGVVGCGLSFVLLTWCIEKRGPVFVAAFIPVVQIIVSVIDFTVLHEQLFLGSVLGSVLVIGGLYLLLWGKRQEALHLPPKVAEHDKEQQQQQQQQQQQQQQQQVQL

SEQ ID NO: 53738 - protein, 350 aa, Oryza sativa
MGSTRTPSIAIPVDSDASPRKNTPETVTSPLVNGEKSIFRDQVRGYSALGSPLRREVGNRSITRSFCIDNTDLEDGKAEKDRDRPSHFLSLPKIQNQALLSGLAYCISSCSMILVNKYILSGYGFSAGIFLMLYQNIVSVTIVSTLSLSGVIPTEPLTWKLIKVWLPVNIIFVGMLITSMFSLKYINVAMLTILKNVANVLTASGETYFFKKQHDRQVWISLTLMIISAIAGGITDLSFNAIGYTWQILNCFLTASYSLTLRHVMDSAKQATKSGNLNELSMVLLNNILSVPLGIILVLGFNEVEYLFETPLLRMPMFWIVITASGVLGLAISFTSMWFLHQSSATTYRY

SEQ ID NO: 53739 - protein, 522 aa, Oryza sativa; identical to SEQ ID NO: 50369

SEQ ID NO: 53740 - protein, 92 aa, Oryza sativa
MPDGRIIVNCGGADAAVSLANDTGLSSWVQNSTIKALCAAFPGQLNWKRLSEKESVNYVALTGPLPNLDEWSTSVPSEMSTKVKQWVPCELA

SEQ ID NO: 53741 - protein, 197 aa, Oryza sativa; identical to SEQ ID NO: 47465

SEQ ID NO: 53742 - protein, 69 aa, Oryza sativa; identical to SEQ ID NO: 49761

SEQ ID NO: 53743 - protein, 585 aa, Oryza sativa
MADDAYDDLPMAGAEEEVDDVMKDELDEEGDSSSPVAMKVGEEKEIGKQGLRKRLLKEGEGWDRPESGDEVQVHYTGTLLDGTKFDSSRDRGTPFKFSLGQGEVIKGWDEGIKTMKKGEQAVFTVPPELAYGEAGSPPAIPPNATLRFDVELLSWASVKDICKDGGIFKKVLAEGHKWENPKDLDEVLVKYEARLEDGTVVSKSDGVEFAVKDGYFCPALSKAVKTMKKGEKVLLTVKPQYGFGEQGKPASGAEAAVPPNATLYVDLELLSWKTVTLIGDDKRILKKVLKEGEGYERPNDGAVVRVRFIGKLEDGTVFSKKGHDGDEPFEFRTDEEQVIEGLDRTVVTMKKGEVALVRLPPQHAFGSTETKQDLAVVPANSTVWYEVELVSFEKEKESWDLKDNAEKIEAAAKKKDEGNVWFKMGKYAKASKRYEKAAKYIEYDSSFTDDEKKQSKALKVSCKLNNAACKLKLKEYREAEKLCTKVLELESTNVKALYRRTQAYIELADLELAELDVKKALEIDPDNRDVKMVYKTLKEKIKEYNKRDAKFYGNMFAKWRKLEHMENKKVPGKQEAQPMAIDSAA

SEQ ID NO: 53744 - protein, 239 aa, Oryza sativa; identical to SEQ ID NO: 30433

SEQ ID NO: 53745 - protein, 603 aa, Oryza sativa
MGRGDEAEKEGKRRRGRGRSSRRSRDASSDPDPDSASSPSPSSASSPSRSPDRRSRSRSSGSKRRKASSSSRRHRHHHHKSSGRSRRSRDDDDERRRRRRRRDEERGRRGGDASESSGSGSEEPDRAEEAREIVRDILGDFPAVAGELRQLLQMIDNGEGIDISGISDKPLVKRLKKLFRSLKLRESSNGAYLLPPKSVPTLDVVGSALVASGELADNENKNPASPTRQEQPSSNFDVQNKNDSTPEEPAKNDADERPPKRRVIGPAMPSRELLAAAAEMTEALRSRDAEVEADDGFLIGPPPPAMVAEAASANEAERFEEVTRILAADENSPYDVVGINWKMSSDNIKKRYWKLSLLVHPDKCPHPSAQEAFVKLNNAFKDLQDPEKRGVIDEKIKKKEEMEQFEVELKAMRGAAEWRRLQGVSLEGDDELLAVPKQAQAPKRDEWMTTLPPERKPGVPMHSTTSFSMNGKEGRGDTSVWTDTPLERAQKAQQNYLEAYNKAKAIADADEEKIKTSDASLVDTYNSSKRSVSLVQKHRESKKEKKKQKQRDKEEWEGNHPWKPWDREKDLTAGRQNVNLDPENMAQGLSSRFSSGAVQRNFL

SEQ ID NO: 53746 - protein, 232 aa, Oryza sativa
MATAAQAAAAAFLSFLSSSPPHHTAPSSSVSFLAARVLPASLRAAAAGSPTSASRSRGRGVAAVVAQLPTANPEVASGEKKIRWSSRAVRSFAMAELEARKMRYPTTGTEGLLMGILVEGTSDAAKLLRANGITLLKVREEAANVLGKSEMFYFSPMHPPLTEAAQRALDWAINEKLKSGEDGEVTANHLLLGIWSDKESAGHKVLASLGFDDERANSLAKTAGEEAAMSPR

SEQ ID NO: 53747 - protein, 31 aa, Oryza sativa
MSCKSKEVNNTTCLQYYKLIDLFHYELKPTV

SEQ ID NO: 53748 - protein, 462 aa, Oryza sativa
MATATCRSCLGGIVGMMPKYFSGKQGGRVLGLRCNYRYEIYPFFDGVSLLQLPAASLGAPPAPSPAAVNVTPPATTTGTRRRGNTTGRVLAIALPIVAAILAAVVICFYIWKRKTERARKPSIADPTDPADIESIDSLILSISTLRVATNNFDDSNKLGEGGFGAVYKGVLPSDQEIAVKRLSQSSRQGIEELKNELVLVAKLQHKNLVRLLGVCLEEHEKLLVYEYMPNKSLDTILFDPDRSNVLDWWKRLKIVNAIARGLQYLHEDSQLKIIHRDLKASNVLLDSDFNPKISDFGLARLFGNDQSQDVTNRVVGTYGYMAPEYAMRGHYSIKSDVFSFGVLILEIVTGRKNNVSYDSEQSVDLLTLVWEHWLAGTVVELADSSMAGHCPGDQILKCVHIGLLCVQEDPTERPMMSMVNVMLSSSTVSLQAPSRPAFCIQKSSVNSDSYSEPFRGANQSTV

SEQ ID NO: 53749 - protein, 231 aa, Oryza sativa
MNDADVGKQIQQMVRFILQEAEEKASEISVAAEEEFNIEKLQLVESEKRRIRQDYERKAKQVDVGRKIEYSTQLNAARIKVLRAQDGVVGEMKEDAGKSLLRVTKDATAYRKVLKGLIVQSLLRLREPSVVLRCREADRGHVESVLEAAKKEYAEKAKVNLPKILIDGKVYLPPPKTARDAHGPFCSGGVVIASQDGKIVCDNTLDARVEISFKQKLPEIRKKLFSQKVSQ

SEQ ID NO: 53750 - protein, 187 aa, Oryza sativa
MSDVVAMAGQAYMRQLQAHPLRTKAITSGVLAGCSDAIAQKISGVPNLQRRRLLLIMLYGFAYAGPFGHFLHKLMDRFFKGKKGKETTAKKVLVEQLTASPWNNMMFMMYYGLVVEGRPFSQVKSKLKKDYASVQLTAWKFWPIVSWINYEYMPLQLRVLFHSFVASCWAVFLNLKAARSIATSKKA

SEQ ID NO: 53751 - protein, 508 aa, Oryza sativa
MAMAVEGAGAGVVVSEPEVVSIPPTPRGMSTPDGTATPPPAAGRGAATPATRVVERLRGYLEEVGHLTRLNPQDAWLPITESRSGNARYAAFHTLNAGLGFQALLLPLAFPALGWSWGIISLTVAYFWQLYTLWILVKLHEAVPGRRYNRYVELAQAAFGEKLGMWLSLFPTIYLSAGSATALILVGGETMKLFYQIVCGPICSPSPISTIEWYLVFTSLAIVLSQLPNLNSIAGVSLIGGTTAITYCTMSWVLSVSQPQPPTVSYEPQAYTSLGSSLFSTLNALGIIAFAFRGHNLALEIQATMPSTFKHPAHVPMWRGAKVAYALFAMCLFPVAIGGYWAYGNMVPQGGMLTALYAFHSHDIPRGLLAATFLLVVFNCLSSFQIYSMPVFDSFEAAYTGRTNRPCSVWVRSGFRVFYGFLSLFISVALPFLSSLAGLLGGLTLPVTFAYPCFMWICIKKPERFSSGWYLNWGLGLLGTAFSLALCVGGVWSIISSGMKFKFFKPPS

SEQ ID NO: 53752 - protein, 352 aa, Oryza sativa
MAPAIAKPLLSDLVAQSGQVPSSHIRPVGDRPDLDNVDHESGAGIPVIDLKQLDGPDRRKVVEAIGSACETDGFFMVKNHGIPEEVVEGMLRVAREFFHMPESERLKCYSDDPKKAIRLSTSFNVRTEKVSNWRDFLRLHCYPLESFIDQWPSNPPSFRQVVGTYSREARALALRLLEAISESLGLERGHMVSAMGRQAQHMAVNYYPPCPQPELTYGLPGHKDPNAITLLLQDGVSGLQVQRNGRWVAVNPVPDALVINIGDQIQALSNDRYKSVLHRVIVNSESERISVPTFYCPSPDAVIAPAGALVDGALHPLAYRPFKYQAYYDEFWNMGLQSASCLDRFRPNDQAV

SEQ ID NO: 53753 - protein, 168 aa, Oryza sativa
MEQEVENLSRDKQELQEKFAEKSRQKRKLDEMYDQLRSEYESAKRSAIQPANNYFPRAQPDLFSGVPNIMDSSDPLRQGLAGLPETPGRRDEGWAPPPRQRRSTSGPFELSAGSPAHNAAPPVDIRPRQPARPVFGTAMNNTSAALRNMIISPVKRPQLSRNRPHMFT

SEQ ID NO: 53754 - protein, 123 aa, Oryza sativa
MSQSDVVYSCGSCGYPLNLSSSNRSTSDVGSSYQKSVKKGLISFITVDLSRFTQVDEISCFPLTWRSYRPKTKLLCRKCGASIGYGYGEPAVLCSFDPASSSSSTSQKYLIKIQALQPSDSTQ

SEQ ID NO: 53755 - protein, 583 aa, Oryza sativa
MCRHQPRARLSPDEQLAAEESFALYCKPVELYNIIQRRSIKNPAFLQRCLLYKIHARRKKRSLITISLSGGTNKELRAQNIFPLYVLLARPTNNVSLEGHSPIYRFSRACLLTSFHEFGNKDYTEATFVIPDVKNLATSRACSLNIILISCGRAEQTFDDNNCSGNHVEGSTLQKLEGKCFWGKIPIDLLASSLGNCVSLSLGHTVEMSSTVEMTPSFLEPKFLEDDSCLTFCSQKVDATGSFQLQVSISAQEAGAKDMSESPYSVYSYNDVPPSSLTHIIRLRSGNVLFNYKYYNNTMQKTEVTEDFSCPFCLVPCGSFKGLGCHLNASHDLFHYEFWISEECQAVNVSLKTDSWRTELLAEGVDPRHQTFSYRSRFKKRKRVEISSDKIRHVHPHIVDSGSPEDAQAGSEDDYVQRENGSSVAHASVDPANSLHGSNLSAPTVLQFGKTRKLSVERADPRNRQLLQKRQFFHSHRAQPMALEQVFSDRDSEDEVDDDIADFEDRRMLDDFVDVTKDEKLIMHMWNSFVRKQRVLADGHIPWACEAFSQFHGQELVQNPALLWCWRFLWSNSGTTVYWMREP

SEQ ID NO: 53756 - protein, 453 aa, Oryza sativa
MDAVMSAADDAGAASGREDPPPAVVLVSAGASHSVALLAGNVLCSWGRGEDGQLGHGDAEDRLVPTVLSGFDAAAPGITSVICGADHTTAYSEDEQQVYSWGWGDFGRLGHGNSSDVFTPQPVKALQGIKIKQIACGDSHCLAVTMAGEVQSWGRNQNGQLGLGTTEDSLLPQKIQSFEGVCVKMIAAGAEHTAAVTEDGDLYGWGWGRYGNLGLGDRNDRLVPEKVSSVEGEKMVLIACGWRHTITVSSSGSLYTYGWSKYGQLGHGDFEDHLVPHKLEALKDSSISQISGGWRHTMALTSDGKLYGWGWNKFGQVGVGDTDDHCFPVQVKFPEDQKVAQVACGWRHTLAFTEKKNVFSWGRGTSGQLGHGEIVDRNKPVMIDALSPDGPGCKKLEPSTAVPFAAKVWVSPSERYAIVPDEKVPNSGEGTARGNGADANVPENDVKRMRVHS

SEQ ID NO: 53757 - protein, 732 aa, Oryza sativa
MNAIAVNEFLGHKWNRLVQGTNTTLGIEVLKSRGMFTEAKWYWIGVGALFGYVIVFNILFTIALGYLKPSGKAQQILSEEALKEKHANITGETINDPRNSASSGQTTNTRRNAAPGEASENRRGMVLPFAPLAVAFNNIRYSVDMPPEMKAQGVDQDRLLLLKGVSGSFRPGVLTALMGVSGAGKTTLMDVLAGRKTGGYIEGDISISGYPKKQETFARVSGYCEQNDIHSPNVTVYESLAYSAWLRLPSDVDSETRKMFIEQVMELVELNPLRDALVGLPGVNGLSTEQRKRLTIAVELVANPSIIFMDEPTSGLDARAAAIVMRTVRNTVDTGRTVVCTIHQPSIDIFEAFDELFLMKRGGEEIYVGPLGHHSCDLIEYFEGVEGVSKIKPGYNPATWMLEVTTLAQEDVLGISFTDVYKNSDLYQRNQSLIKGISRPPQGSKDLFFPTQFSQSFSTQCMACLWKQNLSYWRNPPYTVVRFFFSLIVALMFGTIFWRLGSKRSRQQDLFNAMGSMYAAVLFMGISYSSSVQPVVAVERTVFYRERAAGMYSALPYAFGQVVVELPYVLVQSAVYGVIVYAMIGFEWEAKKFFWYLYFMYFTLLYFTFYGMLAVGLTPSYNIASIVSSFFYGIWNLFSGFVIPRPSMPVWWRWYSWACPVSWTLYGLVASQFGDLKEPLRDTGVPIDVFLREYFGFKHDFLGVVAVAVAGFATLFAVSFSLSIKMLNFQRR

SEQ ID NO: 53758 - protein, 288 aa, Oryza sativa
MKIGDGSTSDASVERVVPNSSVMELLLLTRANYHQWALVMRVSLEALELWDAVEAVTKDRRALATILHAVPPKMKVGLAVKTSAKEAWDSVKKMRAGDDRVKSASVQRFMKEFENMMFRDGETVGDFAMRINGPTASLRDLGEEIEDSHVVKKVLRVVPKRLKQVTVAIEMLEDMDDMSVEELVGRLQVAVDADVEDQTEVHGGQLLLAEEQWEASRRQRGSKQHTGSGVRHDNGKKGDDHGGDCEDDDDDGSSTSSGLDRQDPVECAPLDRIPSNALHSIAWLVKLS

SEQ ID NO: 53759 - protein, 390 aa, Oryza sativa
MRLRLHLLILCLIILFLVYNMASYQHKQTKLEAKSRPFDTITVSDKVSSKVSKRSANRVGFLPHGIVEPYSDMELKPLWLTRSAQSKDSSQKDRCLLAIPAGIDQKRSVDAIMKKFLPENFTVMLFHYDGNVDGWNDLPWSKSVIHIAASNQTKWWFAKRFLHPSVVSMYEYIFLWDEDLEVDNFHPRRYLNIVKSEGLEISQPGLDPKLSEIHHRITVRKKGWSFHRKVNRGNKDCAKEGPPCSGWVEGMAPVFSRSAWRCAWHLIQNDLIHGWGIDYKFGYCAQGDRTKNIGVVDSEYIVHRGVQTLGGPSVKRSHGKNNDPLHQKTAEAQQQMRVKAGLDMRTKVRRYSRSELRDFQKRWERATREDRAWVDPFARPRRKRKRTDRQ

SEQ ID NO: 53760 - protein, 793 aa, Oryza sativa
MDNRNHGRCSLPRLAVGAAVLLLAVSLAATPAASHAGHDDTGLHSNYLVIVRKPYAYDTNLYKNVSSWHASLVASVCDMAKEALERDPSSVSRLIYSYRNVVNGFAARLTPEEVEEMSKNDWFIRADPEKTYQLQTTHTPQLLGLMGGARRGGVWNTSNMGEGIIIGILDDGIYAGHPSFDGAGMKPPPAKWSGRCDFNKTVCNNKLIGARSYFESAKWKWKGLRDPVLPINEGQHGTHTSSTAAGSFVPGANVSGYAVGTAGGMAPRAHIAFYQVCYVEKGCDRDDILAAVDDALEDGVDILSLSLGDEQAGDFSDDPVSLGGYSAAMHGVLVSAAGGNTGPGPSTVVNEAPWVITVGAGTTDRRFVATVKLGSGVSLDGESLSEPKDFGAEMRPLVHDVGDGMCTTESVLRAMNVTGKIIICDAGGDVSVAKAKLVLRSGAAGMIVIAPQVYGSVIVPRPHVLPTVQMPFMIGQKIKAYIRSTPSPTANFIFKGTVFKAKSPVAAPFSSRGPNRRSRGILKPDIIGPGVNILAGVPKIEDLALGAEEVMPKFDIKSGTSMAAPHISGVAALIKNAHPTWSPAAIKSAMMTTADYTDNLRKPITDVDGAPATYYAIGAGYVNARKAIDPGLVYNLSSLDYIPYLCGLGYKDQKVNSIIHPGPAVECAKMPKVDQKDLNYPSITAVLDMEPYEVSINRSATNVGAATSTYAVEVDVPATLAVEVNPAKLEFRALNEVLNYTVTVKTASGKAPASTIEGQLKWVSGKKYVVRSPILVCAGTGGKSAASMGAAPA

SEQ ID NO: 53761 - protein, 575 aa, Oryza sativa
MTYFPEEVVEHIFSFLPAQRDRNTVSLVCKVWYEIERLSRRGVFVGNCYAVRAGRVAARFPNVRALTVKGKPHFADFNLVPPDWGGYAGPWIEAAARGCHGLEELRMKRMVVSDESLELLARSFPRFRALVLISCEGFSTDGLAAVASHCKLLRELDLQENEVEDRGPRWLSCFPDSCTSLVSLNFACIKGEVNAGSLERLVSRSPNLRSLRLNRSVSVDTLAKILLRTPNLEDLGTGNLTDDFQTESYFKLTSALEKCKMLRSLSGFWDASPVCLSFIYPLCAQLTGLNLSYAPTLDASDLTKMISRCVKLQRLWVLDCISDKGLQVVASSCKDLQELRVFPSDFYVAGYSAVTEEGLVAVSLGCPKLNSLLYFCHQMTNAALVTVAKNCPNFTRFRLCILEPGKPDVVTSQPLDEGFGAIVRECKGLQRLSISGLLTDKVFMYIGKYAKQLEMLSIAFAGDSDKGMMHVMNGCKNLRKLEIRDSPFGDAALLGNFARYETMRSLWMSSCNVTLKGCQVLASKMPMLNVEVINERDGSNEMEENHGDLPKVEKLYVYRTTAGARDDAPNFVKIL

SEQ ID NO: 53762 - protein, 114 aa, Oryza sativa
MRRRGRPAERQEPPRLARADEERAGSSKGVLRRRDRHGRRGAGADAPPRRLLRPRLAPRDGAAQAADSRMEGGGEYGELVVGELGRSLLRLLGSAGRRGESDRRGEQRRRWRRR

SEQ ID NO: 53763 - protein, 209 aa, Oryza sativa
METLKGPNRAFGDLIEASGITEDMIASLILLKDVRGVPGLPPLREIEDETIEKMNATSSRADVERQKQEEIAKARVRQVDEKGRAYGTGKRKCSIARVWIQPGDGKFIVNDKQFDSYFPILDHRADLLRPFTVTKTLGRWDVTCTVKGGGVSGQVGAIRLGISRALQNWEPGLRPNLKAAGYLTRDSRVVERKKPGKAKARKSFQWVKR

SEQ ID NO: 53764 - protein, 68 aa, Oryza sativa
MLMCVCVESGLEGFLSSECRSENRTFAFYSVFLVCPHDLFIFCFFCFAFHEQTTTALLACYCPSQFGK

SEQ ID NO: 53765 - protein, 63 aa, Oryza sativa
MELGSASQVGRSSYPAVARSGAAATVDFFHGGQGGLLHRSGLVASCAALLFQFFLEASSPRLT

SEQ ID NO: 53766 - protein, 202 aa, Oryza sativa
MESGPKSEAKQDEEGSSAMGGGGGSSRSSKVYHERQRLQFCLLHALNNLMQEKESFTRAELDGIAGNLVQIDPNKEHWTPMSLIFKPHHNVFTGNYDVNVLITALEARKKKVIWHDHRKGASSIDLDADALFGLMINVPVRRFRGLWTGRHWVAIRSINGTWFNLDSDFSAPKEFQDKEKLIAFLDSILSQGGEVMIVLQDE

SEQ ID NO: 53767 - protein, 134 aa, Oryza sativa
MSAPESQLVVHIDDVSISQKTTQILTNPVTESSMSYLDDHIIDAYVTCLREKDMKEGTRTRAEGTVFPEKPLITRLLQRDGEHYVSKDIIDRAMAKATANRYLKHDMIFLPMNIKEKPLVPGSHTRQTPHHPSA

SEQ ID NO: 53768 - protein, 374 aa, Oryza sativa; identical to SEQ ID NO: 30973

SEQ ID NO: 53769 - protein, 89 aa, Oryza sativa
MLKKPNQTEARRREPTSISHHPNNGILPPPAMLPLLCGDGATSALLAGWRSAPAADGMDGGGRSAAGCLWPMGHTHRPIRLEIFLLRKK

SEQ ID NO: 53770 - protein, 423 aa, Oryza sativa
MNQEEYVEKKALHTMATAEELGGKKLDANLTAAEEAKVTWVIDPKGTPGDTTFTTITAALEKVPEGNKKRVILDLKPGAEFREKIFLNLSKPFITFKSDPKNPAVIAWSDTAATRGKDGKPVGTVGSTTVAIESDYFVAHGVVFKNDAPMAKPGAEGGQAVALRLFGTKAAIYNCTIDGGQDTLYDHKGLHYIKDCLIMGSVDFIFGFGRSYYEGCTIVSVTKEVSVLTAQQRSKTIEGALESGFSFKNCSIKGEGQIYLGRAWGESSRVVYAYTDMSKEVVPVGWDGWNIAKPESSGIYYGEFKCTGPGSDAKKRVGWALDLTEEQAKPFIGTHYIYGDSWLIPPEGTSTSSSSASTSSNSTAEAPTASSNSTASANKKESNSTAEAPTATSYSTASATTSNSTASAKATNYSSSSPPAKGK

SEQ ID NO: 53771 - protein, 446 aa, Oryza sativa
MFVEGFRVESPRVRYGDGEIESEYRYDTTEVVAPPSPEKGWVVRPKSVTYHFKTTTTVPKLGVMLVGWGGNNGTTLTAGVIANREGISWATKEKVHKANYFGSLTQSSTIRVGSYNGEEIYAPFKSLIPMVNPNDIVFGGWDISSMNLADAMTRARVLDIDLQKQLRHHMESMVPLPGVYNPDFIAANQGSRANNVIKGTKKEQVEQVKKDIREFKEKSKVDKVVVLWTANTERYSNVVAGMNDTMDNLLGVAGQGRAGDVAVDALRHRLRHGGRPLHQRQPPEHLRARADRARHQEELGDRRRRLQEWADQDEVRPRRLPRRRRHQADVDRELQPPRQQRRHEPVGAADVPVQGDLQERRRRRHGLQQRHPLRARRAPRPRHRHQVYSIRWGQQEGHGRVHLGDLHGREEHHRAAQHLRGLAPRRAHHPRPRPPRRAQHQDPAQS

SEQ ID NO: 53772 - protein, 406 aa, Oryza sativa; identical to SEQ ID NO: 47721

SEQ ID NO: 53773 - protein, 58 aa, Oryza sativa
MFPYLQSKPSFPFSFFSFYNLPSTIKEITDLENSTVCVILTYSGISQLMYLCNDNGIS

SEQ ID NO: 53774 - protein, 150 aa, Oryza sativa
MELHRHWLAPYAVTHFLLFLRSRWRWSPPPPHVLPVQAEAEGSGLIQRADGRRCGSWPWIGSPSSTRRRGGTTVEEDGFAVAVVHVDLLLIPFLSSNMWIEGGGTSPPAANQGGLPQHFLMRGGSGSGGPIPVLLVEREEPTYSVANLLS

SEQ ID NO: 53775 - protein, 218 aa, Oryza sativa
MTRPLTALLKKGVPFKWAELQQQAFSQVKWAMVQAPVLALPDFSQEFIVETDACDKGIGAVLLQNGHPIAYLSKALGVKAQALFTYEKECLAILMAVNKWRAYLQNNEFVIQTNHKSLTHLGEQKLTTSMQHKAFIKLMGLQYKIRYKQGAENRVADALSRRDADEELSAISVGRPKWLESVVDWYDQDEEAKQLLAQLIINLVGVEHFTLTNGVIRF

SEQ ID NO: 53776 - protein, 1092 aa, Oryza sativa
MEASAGLVAGSHNRNELVVIRRDGEPGPKPVKHTNGQVCQICGDDVGLTPDGEPFVACNECAFPVCRDCYEYERREGTQNCPQCKTRFKRLKGCARVPGDEEEEDVDDLENEFNWRDKTDSQYVAESMLHGHMSYGRGGDLDGVPQHFQPIPNVPLLTNGEMADDIPPEQHALVPSFMGGGGKRIHPLPYADPNLPVQPRSMDPSKDLAAYGYGSVAWKERMESWKQKQERLHQMRNDGGGKDWDGDGDDADLPLMDEARQPLSRKIPISSSLVNPYRMIIIIRLVVLGFFFHYRVMHPVPDAFALWLISVICEIWFAMSWILDQFPKWFPIERETYLDRLTLRFDKEGQQSQLAPVDFFVSTVDPMKEPPLVTANTVLSILAVDYPVDKVSCYVSDDGAAMLTFEALSETSEFAKKWVPFCKRYSLEPRAPEWYFQQKIDYLKDKVAPNFVRERRAMKREYEEFKVRINALVAKAQKVPEEGWTMQDGTPWPGNNVRDHPGMIQVFLGQSGGHDVEGNELPRLVYVSREKRPGYNHHKKAGAMNALVRVSAVLTNAPYMLNLDCDHYINNSKAIKEAMCFMMDPLVGKKVCYVQFPQRFDGIDRHDRYANRNVVFFDINMKGLDGIQGPIYVGTGCVFRRQALYGYDAPKSKKPPSRTCNCWPKWCICCCCFGNRTNKKKTAKPKTEKKKRLFFKRAENQSPAYALGEIDEGAPGAENEKAGIVNQQKLEKKFGQSSVFVASTLLENGGTLKSASPASLLKEAIHVISCGYEDKTDWGKEIGWIYGSVTEDILTGFKMHCHGWRSIYCIPKRAAFKGSAPLNLSDRLHQVLRWALGSIEIFFSNHCPLWYGYGGGLKCLERFSYINSIVYPWTSIPLLAYCTLPAICLLTGKFITPELTSIASLWFMSLFICIFATGILEMRWSGVGIDDWWRNEQFWVIGGVSSHLFAVFQGLLKVIAGIDTSFTVTSKGGDDEEFSELYTFKWTTLLIPPTTLLLLNFIGVVAGVSNAINNGYESWGPLFGKLFFAFWVIVHLYPFLKGLVGRQNRTPTIVIVWSILLASIFSLLWVRIDPFLAKNDGPLLEECGLDCN

SEQ ID NO: 53777 - protein, 792 aa, Oryza sativa
MWNPLSWVMEIAAIMAIVLANGGGRPPDWQDFVGIVSLLIINSTISYIEEANAGDAAAALMAGLAPKTKLLRDGRWEEQEAAILVPGDIISIKLGDIIPADARLLEGDPLKIDQSALTGESLPVNKHPGQEVFSGSTVKQGEIEAVVIATGVRTFFGKAAHLVDSTNNVGHFQQVLTAIGNFCIISIGAGMAVEVLVMYPIQHRAYRDGIDNLLVLLIGGIPIAMPTVLSVTMAIGSHRLSQQGAITKRMTAIEEMAGMDVLCSDKTGTLTLNKLTVDKTLIEVCSKGVDKDMVLLYAARASRVENQDAIDTCIVNMLDDPKEARAGIQEVHFLPFNPVDKRTAITYIDGNGDWHRVSKGAPEQIIELCNMAADAEKKVHALIDSYADRGLRSLGVSYQQVPEKSKDSGGDPWQFIGLLPLFDPPRHDSAETIRRALHLGVNVKMITGDQLAIAKETGRRLGMGTNMYPSTTLLGDKNSQVNGLPIDELIERADGFAGVFPEHKYEIVKRLQEMSHICGMTGDGVNDAPALKKADIGIAVDDATDAARSASDIVLTEPGLSVIVSAVLTSRAIFQRMKNYTIYAVSITIRIVLGFLLIAIIWKFDFAPFMVLIIAILNDGTIMTISKGRVKPSPTPDCWKLNEIFLTGVVLGTYMALVTVLFFYLAHDTNFFTDVFGVTSIRESERELMAALYLQVSIISQALIFVTRSRSWSFVERPGFLLLFAFFAAQMVATAIAVYARWDFCRIQGIGWRWGGAVWQFSVVTYLPLDVLKFIIRYALTGGKAGDSAQKK

SEQ ID NO: 53778 - protein, 85 aa, Oryza sativa
MELQDRWDYRRILQPEHTFASLPKTFPFSFNFCFGHQNCSLRHIAMILVCLCFSLFVTDSLIFSKVIDWRLLTCSVCVLSLYLNH

SEQ ID NO: 53779 - protein, 89 aa, Oryza sativa
MTDDTKICGAKVTARDGQAGATPRRPTVLQPSAQIGRWSRQGGGDGASTRDREGRGSAAWLRGACWAMSGRLAADRQSEKERSRLSRGR

SEQ ID NO: 53780 - protein, 456 aa, Oryza sativa; identical to SEQ ID NO: 32014

SEQ ID NO: 53781 - protein, 239 aa, Oryza sativa
MLSGRDSYSKDPNFLLSPKLPTASTSSCDGKDQCTDKPMKGPSQMEVCDSTIHCPKDILNRLTLPQGQDLDSLLSPGCESSAAVKPSLPSVTTHGASLPPFPWSHSQAGGYRPGADCGKHGSSRSNTQWQWVRVGSNLTALDSEDPSVHKIDDLLQEMDTAKTSIMDSYGKQSSLCCTESTSGSLGQIIQSRKKLNGHNPQQLFSMDNVDSSDSFQKNDNESFLLRTPQGMQFMKEKSF

SEQ ID NO: 53782 - protein, 575 aa, Oryza sativa
MSASGGLSLVRRAVEAARRTPRWQKRLLVLTAGVGSLTYACQDNQVLQINDGTGKKRVVIVGTGWAGASFLRNIDTSLYDVHVVSPRNYFTFTPLLPSVTCGTVEARSIVEPIRNIVRKRGGAFRFWEAECYKIDPTNKKIHCRSDSDGNSEFVVDYDYLVVSVGARPNTFNTPGVVENCHFLKEVEDAQKIRKSVLKCFERASLPNLTEEERKKNLHFVVIGGGPTGVEFAAELHDFVNEDLAKLYPDVKKYANISVIEAGDHILTMFDKRITQFAEDKFKRTGIDLKTNFKVVKVSDKAITMTNSATGEIAVPYGMAVWSTGIGTRPLIMDFMKQVGQANRRVLATDEWLRVHGCDDVYALGDCATITQRKVMEDIASIFRVADKDNSGSLTVKKIKNVLGDIYERYPQVELYLKTNQMKDFHDLLKDSDGNAIKESKELNIEEFKKALARVDSQVKMLPATAQVASQEGAYLANCFNKMKYCEENPEGPLRIRGTGRHRFKPFRYRHLGQFAPLGGEQTAAQLPGDWIHVGHSTQWLWYSVYASKQFSWRTRMLVVSDWGRRFIYGRDSSSL

SEQ ID NO: 53783 - protein, 599 aa, Oryza sativa
MLADLNVDPPESDGEDQPPTPNPNVNPATAAVTAATVVAIDSSTRSSNDEGSLAKSVITTKEPDTVECEDADQHCQGASVAREEKVSNLKAALVHVARKMPKNAHAHFMLGLMYQRLGQPQKAIAAYEKSSEILLQDEEEVRRPDLLSSVRIHHAQCILQTSMGDTFDEELESGELDEILVKMKSSVESDPRQAAVWNILGLVLLRSGQLQSAISVLSSLTVVAPDYLDSLANLGVAYIQSGNLELATKCFQELVIKDQNHPAALVNYAALLLCKYGSFAAGSGGNVSAGSCLHQKEGLAVAKECLLAAVKADPKAASVWVNLANAYYMAGEHRNSKRCLEQAAKHEPSHMPARYAIAVHRIRDAVRSQCSDDQLLWASNEMATVLKEGDPSAVDAPIAWAGLAMAHRAQHEIAAAYDTEQINLSDVEERALYTLKQAIQEDPDDAVQWHQLGLYNICTTQFSRSVNFLKAAVARSPDCSYVWSNLGIALQLSDDSSCETVYKRALILSSSQQSYAILSNLGILYRQHGRYELARRMLLRSLELCPGHAPANNNLGLVSIAEGRYEEAISCFEKSLQSDPLLDAAKSNLAKVLALSKKQ

SEQ ID NO: 53784 - protein, 457 aa, Oryza sativa
MAAAVRDGAAVAGYMAEDDPDGAASEDGDMDVEVGGEESQARDGDRRDGGDGDDEYALLTRITDTSAAEARAGKDIQGIPWERLQITRSDYRKARLVQYKNYENFPQSGELMDKICKQVDKISKYYEFHYNTRLVKPSILHFQLRNLLWATSKHDVYFMSNSTVGHWSSLSHNLSEVLDFSGHVAPAQKHPGSLLEGFSGVQVSTLSVNEGLLVAGGFQGELICKVVGDRDVKFCTRTTLSDNAITNAIDIHRSASGSLRVTVSNNDCGVREFDMETFQLLNHFSYNWPVNHTSVSPDRKLLAVVGDDRDALLVDSRNGKVTSTLVGHLDYSFASAWHPDGRTFATGNQDKTCRVWDVRNLSTSLSVLRGNIGAIRCIRYSSDGQFMLFSEPADFVHVYSAAADYKKRQEIDFFGEISGISLSPDDESLFVGVCDRVYASLLHYRMVHSFGYLDSFM

SEQ ID NO: 53785 - protein, 718 aa, Oryza sativa
MGLPQVPAIKEEVLPTMSASLIVRPHFAGNSTCHLGKLPAESSSNRASPCSYISDFKRNDVLDSLDGFDGNFRASHAAYGPAGFQGLKPDTGDVGSRSGPKLGSNVQMPAMRIVGFESGFANSTGGPDTMVADNTDSPLVIDNCHSLIEQHGPHARKRVLSPLNNALPGHFRGDALNIGSGDAKIQHSDCARRLYTSGFQDRKKANTAILDSFEAPTWPASRYSNWSTEQGVDKFSGSTFTDGPLLESRESFPCSDHLEALESVAVPLAKLAHPPLLNLSPLGPTWMHGTNTVGSHGESLRETEGSTCEGYSEGHGRSRIRDAFEKTNILHDDFDMRIPKKSSDRKSQNWGPESASVSPRIGCIRSIGLLPVRRSLIGSFEESLLSGRYSCGKDNQNIDGFLAVLNVTGGNFSPPTQKLPFSATSIDENSSLLYYSSIDLVGRLPMSSSKSPKLKRSLSNHDSRSAKSRLRIPVKGRVQLVVSNPEKTPLHTFFCNYDLSDMPAGTKTFMRQKVTLFPVSPSNQKKEGSKANETKVESVQFGSELRECGTLFSECCRLGQNCNLIDDSEKGGRKNMTCCSMECDIRESNDSSSLETSENGSSTNVCCCQSDTFPLGEKKYCCRSSKINDPAGGALRYALHLRFLSPFAKKPSRSMQRSKSGVSSEPYNHSSGPEEHRRFYLYNDVRVVFPQRHSDADEGELRVEHDFPADPKYFDISN

SEQ ID NO: 53786 - protein, 476 aa, Oryza sativa
MGTALRGGPGAASIGVRPRGSGIPYRSFLFVWIITLCTALPISSLFPFLYFMIRDLHVAKRTEDIGFYAGFVGASFMFGRCLTSTVWGIAADRIGRKPVVVFGIFAVVIFNTLFGLSFTYWMAIATRFLLGALNGLLGPIKAYAIEVCRPEHEALALSLVSTAWGIGLIIGPAIGGYLSQPAEKFPNVFSPDSLFARFPYFLPCLCISVFAAVVLIGCIWMPETLHKHKADASRSQTVEALESHLIDPKEKADQNGSLDCKKSLLRNWPLMSSIILYCVFSFHDMAYTEIFSLWAESDRKYGGLSLSSEDVGQVLAITGVSLLVYQLFIYPRINKVIGHIKASRIAAILCIPILFAYPYMTYLSGPGLTIILNIASVIKNNLGVTIITGCFILQNNAVPQDQRGAANGLAMTGMSFFKAVAPAGAGIVFSWAQKRQHASFLPGDQMVFFLLNLFELLGLILTFKPFLAVPEQHDTN

SEQ ID NO: 53787 - protein, 1005 aa, Oryza sativa
MGRPRGRGGGGGGGRGRFGGGGGSRFSAARDDPPPRRSSSGWGVAPPSRHLWVGSLSPGVAAADLSELFLRCGDVEGISRDPGRSFAFVTFAREEDAVAAVRELQGIHLRGAPIRIEFSKGDKDSSSSMDDRYSQHADQRRFTERGRNQQSSPEKSTDKSKRSRPAEPSEVLWIGFPVGLKVDEATLWEAFSPFGEVVKITTFPGRTYAFVQYTTIAAACRAKETLQGNIFNNPRVSICFSRSDSVSAEFGKGSLDAPYSPHLNSSVRPIFREQDFEDFPRARPFDSPPRDMYMPSPHYGPKRLSRDHDDVGFSRDNYLRYGPGVEPDPRSNFEPFRIQGLGPERRMSEDPYEQHRRSPAGDAPWHNIPFERSQGALPLEDSRYAREDPYPFSKKLRTGEAHDSELPEYPFSEFDRGKVGSAYPRRPFYGVPDDDIHPRGYQLAPMHGRNHVDPLRNPTPLVDRHIPGHAQDSFSRHVEVERSTPEYHEPLLKEEWKWDGTIAKGGTPICRARCFPVGKVLNFMLPEFLDCTARTSLEMLSKHYYQAASSWVVFFVPENDADMAAYNEFMNYLGDKQRAAVCKLGERSSLFLVPPSDFSEQVLRVPGKVSISGVILKFEQSDPEVSSPTRKPETFVSHLNHDVRAHEDLDALRRINPPDIRPLPQGSDYLGLSPGSYNPASAHLVPPYKFGNAPSYLESELAHQKHPPDSHREIAHDKQQQHPDVLPSRWSDNIYNPSPGSGNLNYLAESAIPHTSTDRTPEAYSFAPQGVPKVSTSGYAPVADEASNMSYPPMQPASQQVVRPQQPPSLPLSLPPEQLAQLATLLAQQNQPGKEPVDSLNKESGFIRNPHGHSSMMPHSSGSIPVQNSLPPAPPSASQLQVHAPPVQGSVPPNPSIMHTPNAPMPSHNTLPLPPMHPSGNPAHSSMPLRSFVPPLPEGPPPLRQHTSSALQAQPALPSGPQTSQQPSAQEDHHGDPQKRLQATLQLAATLLQQIQQQSKPGGQK

SEQ ID NO: 53788 - protein, 347 aa, Oryza sativa
MSTAGGGGGGRRVTIRSISCRGVKAFVPFQKPPLYAAVSLAGRREKTSGDPDGGENPDWDAAVFAFDLPAAADGMLQFEVKAQVPLLGSKLVGKVSVPLADLAVAGGDGAAAAPRHVSYQVCAPDGKANGKLSFTFAVTGGGAYQQPQVDHPTPISSSCCAPPPTSTTTTTSGAPYPPPAMASYPPLPSLSATPSASLYPPPPPSSYPPPPPPPPPPPHVTQSFAPNSSYRPPPPPSQYIAGYPPPPPSNFYPPPPAGYPAPSFPSPTSTYPPPPPPESASSQYPPPLPRSAPCCDRSVDRALPSYMSPRPPPPGAPCYPPPAAWLPDQEAAGAPYSLYPQPGTRYL

SEQ ID NO: 53789 - protein, 1101 aa, Oryza sativa
MRRRWGCLSSLCRPRRGGRAAAAPLPQPDPPRLESKEVEEHGASDKVVMENILSNNDFSEGLHLWHPNGCHGFVAVEGSGYHHGIRPHSGSNYAVLTRRTHNWQGLEQDITEKVTVGTEYIVAAHVRVHGELNEPVGIQATLKLEGDGSSTNYQSVARISASKDCWEKLEGSFELKTLPRRLVFYIEGPPPGVDLLIDSVTISYKKTERAASKLVSGTENIISNYDFSEGLHLWNPICCHAYVASQWSGFLDGIRGSSGENYAVVSKRTESWQGLEQDITDKVSAGTAYAVSAYVRVDGNIHTKVEVKATLRLHNTDDSTHYSPVGSLLASKEKWEKMEGSFCLTNMPKRVVFYLEGPPAGVDLIIDSVNVTCSGYQQLKEVKVPSGVDTIVKNPHFDEGLNNWSGRGCNICRHELTAYGNVKPLNGSYFASATGRVHNWNGIQQDITGRVQRKVLYEISSAVRIFGSANDTEVCVTLWVQEYGRERYVSLAKNPASDKQWTHLKGKFLLHAPFSKAVIFVEGPPAGIDILVDGLVLSPARKLHAAPRPRIENVSYGANVIHNSAFSHGLSGWSPMGSCRLSIHTESPHMLSAILKDPSAKQHIRGSYILATNRTDVWMGPSQLITDKLRLHTTYRVSAWVRAGSGGHGRYHVNVCLAVDHQWVNGGQVEADGDQWYELKGAFKLEKKPSKVTAYVQGPPPGVDLRVMGFQIYAVDRKARFEYLKEKTDKVRKRDVILKFQGSDAANLFGSSIKIQQTENSFPFGSCIGRSNIENEDLADFFMKNFNWAVFENELKWYWTEAEQGRLNYKDSDELLEFCRKHNIQVRGHCLFWEVEDSVQPWIRSLHGHHLMAAIQNRLQSLLSRYKGQFKHHDVNNEMLHGSFYQDRLGNDIRAHMFREAHKLDPSAVLFVNDYNVEDRCDSKSTPEKLIEQIVDLQERGAPVGGIGLQGHITHPVGDIICDSLDKLSILGLPIWITELDVTAENEHIRADDLEVYLREAFAHPSVEGIILWGFWELFMFREHAHLVDVDGTINEAGKRYIALKQEWLTSITGNVDHHGELKFRGYHGSYTVEVATPSGKVTRSFVVDKDNAVQVVTLNI

SEQ ID NO: 53790 - protein, 41 aa, Oryza sativa
MSFTTTFIYSTALPVSFFLLFLVFSSCTSAAAKVRVTVQES

SEQ ID NO: 53791 - protein, 158 aa, Oryza sativa; identical to SEQ ID NO: 29289

SEQ ID NO: 53792 - protein, 353 aa, Oryza sativa
MCAEAAGRHGGEGVDRGRDEGAYGVEEAGPAPAVDNVLPPRRQVGAPAGGARQAPPHRRRRQDRRAPPQVHVAPLAVPLAPPPPPARGRRRHRGVVGGRARRPPQDPPHAPRARLLRRRARQAHGDGGGAQPRRRPRAALRRRELQPGGGQGAAGARRRRRQPPGGPRREDAAARRGGDGVPGHGGRAARPPRRPQRPHRRRRHAARHPPHAHLRLPLQGRRARPGAHRAQQAPPLPGARAVGGHGDVPGGRPDRRGQCGAHLRRVPRRRRRRWRVQCQWHQLEHGEPELGQQDGVPEPGDGRAVREDERRWRRRRRREQRAIVVVLPTWLPLTTKGGVAASALLSPCKLRTN

SEQ ID NO: 53793 - protein, 32 aa, Oryza sativa
MKRFRRLNQDFPGKVQDMEGSWTAFKKHVVGT

SEQ ID NO: 53794 - protein, 287 aa, Oryza sativa
MSPSTIDFSRRFLNLIVGNRTPGVKSLWCFDLMRQQLFYPATPPPPHKVEEFWQKFRPPGTMMDSMGLPFSCFTFRASALNVNGQSRMDCFPLAGGEVICMDQSGRAFLVDADACQVGTMPSLHNPKSMPLAVFVPNAKADNDYDHDGYGSSLFVMERIPKPELGFNSDQFEAFIYRKPTISNYTKAWHCHQLPPPPFVREPKHWHSCSNPEISSYAVLGGGSHICLSVNGIGTYCLETASHTWSQVGKWTLPFHGRIDYVPEFNLWFGLSAEARRLAAADLSAMDS

SEQ ID NO: 53795 - protein, 388 aa, Oryza sativa; identical to SEQ ID NO: 35272

SEQ ID NO: 53796 - protein, 632 aa, Oryza sativa
MSSAAVMPTPSMNSSSAGAAAAAAAAEGGGGEDERRARALSSSSSSLRQRAMSASSKLLRTSLSRSSKGAAARQRSSKVMSVSIEDVRDAEEMKSVDAFRQTLVLEELLPARHDDYHMMLRFLRARKFDIDKSKQMWSDMLQWRKEFGSDTILDDFQFEEMDQVLEHYPQGHHGVDRDGRPVYIEKLGAIDTAKLLQVTSMDRYVKYHVREFERAFAVKFPACSIAAKRHVDQSTTILDVSGVGYKNFNKAARDLIGRLQKVDGDNYPETLCRMFIINAGQGFRLLWNTVKSFLDPKTTAKIHVLGNKYQSKLLEVIDPSELPEFLGGTCTCEGGCMRSDKGPWKDPEIIKMVQCGMGRCGFNSSGHTEADEKMITEDDIVAIPKKQESIRRDSVDSPKIPREKIEHPQMSPLHEMSTSESKAPPGQEGSSSRYDDLFPMPDKNMDFNWNGEVSAEKLALARDMYASLPDAYKHGDAGDRQVVTGFMAFVMGVVAMFRVGKIAPKRAMDAAMGIATMEAMAKNRKLMQQQQRQLEQLPGPDTVTVSTAQYEALIKRLGDLEEKVAALTSRPPEMPADKEDLLKAAVTRVEALETELESTKKLLETSSGQQEEVLAYIEKKKKKRGMQNPFRW

SEQ ID NO: 53797 - protein, 62 aa, Oryza sativa
MTAAYQWMTLSSFRWLEELCREAEVGYVDIRCLTETRIESIYFDFKLMFRSDIWCTTCSWGF

SEQ ID NO: 53798 - protein, 524 aa, Oryza sativa
MDTRVLPIPMDEATMAEFRQRGQVPEDVESSIGTVLSYIHFAIPDAPVSSHARLSALPPDDDDDGVDRLSLLPDALLRRIVSRLPVKDAARTAALSSRWRDAWRSTPLVLVDADLLPAGVSDADTDAAREEARAVTFAVSRVIAAHPGPFRRLHLTSSFMDQYQGLLASWLQVLAVKGIQELILVNRPFPADLTLPATFFGMATLTRLYLGLWKFPDTAALPRAACFPNLRDLGFSLIGITNHDMDFVLARSPVLETLCLQANTLQRVRVASRSLRCLMMMGFDQDVNVVNAPRLERLIMLYSCGSSMLVKIGRAPSLRAIGYLDLETHVLEIGDTIIKAGTRASPSTMVPSVKILGIIVCFGVRNEAKMLPSFLRCFPNVETLHVESRKTDELTGKLNLKFWQDAGAIECIQSHITVMIFRRFRATRGEINFLKFVLESARMLKKLIIVSPKGTFASTDEANFRLKPLFATKWASKCCSLVVLESDASAGESNWNFERGCDFSLMDPFAIIIRSSRLDISGSC

SEQ ID NO: 53799 - protein, 176 aa, Oryza sativa
MCRVTVELAIPCPKSGPRVFKGFTVGFHPRSSELVYNGLTQLGFEQSHHEFSFQGEQSHVSLYLSAVFSLSGLVGKPSLKVNPVKGLDVTLTGSGTNGAMPTTLSPTILNVIWRCEIARSSPYEVNILIPVEGYDPIEFTLTKECASLCCQVYFVVEVSSTKHVSNISLVYMRCLG

SEQ ID NO: 53800 - protein, 315 aa, Oryza sativa; identical to SEQ ID NO: 46921

SEQ ID NO: 53801 - protein, 912 aa, Oryza sativa
MNPDNFTHKTNEALVAAHEIASEAGHAQLTPLHLVAALAADKGGILRQAISQASGGGAGAPDSFERVVSGALKKLPSQSPPPDSVPASTALIKVIRRAQSAQKKRGDSHLAVDQLLLGLLEDSLISDCLEEAGVSAARVRAELEKLRGGEGRKVESASGDTNFQALKTYGRDLVEQAGKLDPVIGRDEEIRRVVRILSRRTKNNPVLIGEPGVGKTAVVEGLAQRIVRGDVPSNLLDVRLIALDMGALVAGAKYRGEFEERLKAVLKEVEEAEGKVILFIDEIHLVLGAGRTEGSMDAANLFKPMLARGQLRCIGATTLEEYRKYVEKDAAFERRFQQVFVAEPSVPDTISILRGLKEKYEGHHGVRIQDRALVVAAQLSARYIMGRHLPDKAIDLVDEACANVRVQLDSQPEEIDNLERKRIQLEVEHHALEKEKDKASKARLVEVKKELDDLRDKLQPLTMKYRKEKERIDEIRKLKQRREELQFTLQEAERRMDLARVADLKYGALQEIDVAIAKLESETGENLMLTETVGPEQIAEVVSRWTGIPVTRLGQNDKERLVGLADRLHQRVVGQAEAVSAVAEAVLRSRAGLGRPQQPTGSFLFLGPTGVGKTELAKALAEQLFDDENLLVRIDMSEYMEQHSVARLIGAPPGYVGHEEGGQLTEQVRRRPYSVILFDEVEKAHVAVFNTLLQVLDDGRLTDGQGRTVDFRNTVIIMTSNLGAEHLLAGMVGKNSMKVARDLVMQEVRRHFRPELLNRLDEIVIFDPLSHEQLRKVARLQMKDVAVRLAERGVALAVTDAALDVILSLSYDPVYGARPIRRWIEKRVVTQLSKMLIQEEIDENCTVYIDAAPHKDELAYRVDNRGGLVNAETGQKSDILIQVPNGAATGSDAAQAVKKMRIMEDEDGMDEE

SEQ ID NO: 53802 - protein, 397 aa, Oryza sativa
MAGYPEENQHGMNGYEEEEEVEEVEGFDEEGRPGRRGGGGRDGGDGGAYGDASGDDGRAPGGDSSGKIFVGGVAWETTEESFSKHFEKYGAITDSVIMKDKHTKMPRGFGFVTFSDPSVIDKVLEDEHVIDGRTVEVKRTVPREEMSSKDGPKTRKIFVGGLPSSLTEDELREHFSPYGKIVEHQIMLDHSTGRSRGFGFVTFESEDSVERVISEGRMRDPGGKQVEIKKAEPKKHGGDHSSNGRSSHGSGGGYRSSYRSGGAAASGGGGGGGGGGSGSSGGYGYGAGYRSAGGGYYDSTAYGYGRGGYGYGGNAGFGSGYGGGYGGSLYGGAYGAYGAYGGGAYGGGAYGGGAYGGGAYGGAPGAYGGAGGYGSYGGAGAGGAGGRGSSRYHPYGK

SEQ ID NO: 53803 - protein, 475 aa, Oryza sativa
MLSLRIAAASRLRGLLGGGAATGARTRAFSYGRVVDAAARDGELRVFVVAGEVSGDSLASRLMASLRALSPVPVRFAGVGGELMRNKGLQSLFPMEEISIMGLWELLPHIYNIKRKIEDTADAAVLFQPHAVVTVDSKGFSFRLLKQLKCRYNQVARPLHVHYVAPSFWAWKDGERRLAKLHNFVDHLLCILPFEEEICRLNGLPATYVGHPLLDDAIGLNMEKELSSVNSMHQRSGEDFRQEHEISPDSTIITILPGSRMQEVARMLPIFLQTVQHLSHTFNELSLVIPVAPHRDVRVYVDNVVRSGPFPVVLITGETLKERYDAFNASRAALCTSGTAVMELMLAKLPCVVAYRAHFITECLIHLRKKIDFISLPNILLNSPIVPEILFGACTAENLAAKLSEVICNDEARQLQVESAEQLLEMLYEPIKQRGGLFQEELHNSSLPSNIYSPSTIAALTVLYTDNHQQAVHQN

SEQ ID NO: 53804 - protein, 499 aa, Oryza sativa
MDGHTNGTNGSCSKPCEPLTDYCIPDYILNPDSEQVLVDQAPCCPVVVFINSRSGGQLGSSLIKTYRELLNKAQVFDLSEEAPEKVLHRLYCNFEKLKSNGDPIAFQIQSNLRLIVAGGDGTASWLLGVVSDLKLSHPPPIATVPLGTGNNLPFSFGWGKKNPTTDQEAVKSFLGQVKKAREMNIDSWHIIMRMRAPQEGPCEPIAPLELPHSLHAFHRVSGSDSLNMEGYHTYRGGFWNYFSMGMDAQVSYEFHSERKRNPEKFKNQLTNQSTYAKLGLKQGWFAASLTHPSSRNIAQLAKVRIMKRPGGQWEELKIPRSIRSIVCLNLPSFSGGLNPWGTPGTRKVQDRDLTAPFVDDGLIEVVGFRDAWHGLVLLAPNGHGTRLAQAHRIRFEFHKGAAEHTFMRIDGEPWKQPLPKDDDTVVVEISHLRQVTMLASDPCKSKSVNDPSSPMCCSNHDDDERNSLEDEDEWEEGRKKFGAADTFKFPDEVDVAHLS

SEQ ID NO: 53805 - protein, 373 aa, Oryza sativa
MSQVLVEANGVTRTLVLNRPKQLNALSSAMITCFLRCFTAYEEDDGVKLLIVKGKGRAFCAGGDVAAVVRSINNDSWKYGAHFFRNEFLLNYIIATYSKPQVSLLTGIVMGGGAGVSIHGRFRVVTDSTVFAMPETALGLFPDIGASYFLSRLLGFYGEYVGLTGVRLDAAEMLACGLATHFVPSDRLSLLEESLKKVDTSDPFAICGIIDQYSQQPSLKEKSALNRLEIINKCFSKKTVEEIIASLEQEAPNVADEWIASAIQSMRKASPTSMKISLRSIREGRTQTVGECLRREYRMVCHVMRGDFSRDFFEGCRAILLDRDRNPKWMPPRLEEVHDEVVEKYFSKVDDPEWEDLDLPPRRSHGRRLVPKL

SEQ ID NO: 53806 - protein, 350 aa, Oryza sativa; identical to SEQ ID NO: 30580

SEQ ID NO: 53807 - protein, 713 aa, Oryza sativa
MALQASSSPSMFRAIPTNTNASCRRKLQVRASAAAAAANGGGDGKVMMRKEAASGAWKIDYSGEKPATPLLDTVNYPVHMKNLSTPELEQLAAELRAEIVHTVSKTGGHLSSSLGVVELAVALHHVFDTPEDKIIWDVGHQAYPHKILTGRRSRMHTIRQTSGLAGFPKRDESAHDAFGAGHSSTSISAALGMAVARDLLGKKNHVISVIGDGAMTAGQAYEAMNNSGYLDSNMIVVLNDNKQVSLPTATLDGPATPVGALSKALTKLQSSTKLRRLREAAKTVTKQIGGQAHEVAAKVDEYARGMVSASGSTLFEELGLYYIGPVDGHSVDDLVAIFNKVKSMPAPGPVLVHIVTEKGKGYPPAEAAADRMHGVVKFDPTTGRQFKSKCSTLSYTQYFAEALIREAEADDKVVGIHAAMGGGTGLNYFHKRFPERCFDVGIAEQHAVTFAAGLAAEGLKPFCAIYSSFLQRGYDQVVHDVDLQRLPVRFAMDRAGLVGADGPTHCGAFDVAYMACLPNMVVMAPADEAELMHMVATAAAIDDRPSCFRFPRGNGIGAVLPPNHKGTPLEVGKGRVLVGGNRVALLGYGTMVQACMKAAEALKEHGIYVTVADARFCKPLDTGLIRELAAEHEVLVTVEEGSIGGFGSHVAHYLSLSGLLDGPLKLRSMFLPDRYIDHGAPVDQLEEAGLTPRHIAATVLSLLGRPLEALQLS

SEQ ID NO: 53808 - protein, 519 aa, Oryza sativa
MQFSSVFPLEGKACVSPIRRGGEGSASDRLKIGDSSSIKHDRAVRRMCLGYRGTKNGAQCVLTSDAGPDTLHVRTSFRRNFADPNEVAAVILGGGTGTQLFPLTSTRATPAVPIGGCYRLIDIPMSNCFNSGINKIFIMTQFNSASLNRHIHRTYLGGGINFTDGSVEVLAATQMPGEAAGWFQGTADAVRKFIWVLEDYYKHKAIEHILILSGDQLYRMDYMELVQKHVDDNADITLSCAPVGESRASDYGLVKFDSSGRVIQFSEKPKGTDLEAMKVDTSFLNFAIDDPTKFPYIASMGVYVFKRDVLLNLLKSRYAELHDFGSEILPRALHEHNVQAYVFADYWEDIGTIRSFFDANMALCEQPPKFEFYDPKTPFFTSPRYLPPTKSDKCRIKDAIISHGCFLRECTIEHSIVGVRSRLNSACELKNTMMMGADLYETEDEISRLLSEGKVPIGVGENTKINNCIIDMNARVGRNVVITNSEGVQESDRPEEGYYIRSGIVVILKNATIKDGKVI

SEQ ID NO: 53809 - protein, 1127 aa, Oryza sativa
MACIKSAQRAALTALAPEAPYLAAGTMSGAVDMLFSASANIEIFRLDFQSDSPDLPLLASAPSPDRFNRLSWSRPGAADGDSFSLGLLAGGLSDGSVAVWNPLSMINSEGKAEDALVARLEKHTGPVCGLEFSELTPNRLASGAEQGELCIWDLKNPSEPVVFPPLKSVGSSAQAEISYLTWNPKFQHILATASSNGMTVVWDLRNQKPLTSFSDSNRTKCSVLQWNPDMSTQLIVASDDDNSPSLRVWDVRKTISPVREFVGHSKGVIAMSWCPYDSSYLLTCSKDNRTICWDTVSGEIMSELPASSNGNFDIHWYRKIPGVVAASSFDVKIGIYNLEFSGLYAAGDSAIGAPARPRAPAPKWLKCPTGASFGFGGKLVSFHQAAPTQGAQVTTSEVHVHNLVIEQSLVSRSTEFEAAIQNGDKSSLRALCDKKAQESLSDEERETWGFLRVMFEDGDAARTKLLAHLGFNPPQEQTSSSTDELNRTLADTLNLDHGAPTDTSDSQFMVDNGEDFFNNPQPSEASLAEESISTNGQQIEQEMPVNVEPSDLSVDKSIQHALVVGVYKGAVNLCLAANRMADALVIAHAGGSALWESTRNQYLKNTVSPYLKVVSAMVGNDLMSFVSTWPLNAWKETLALLCTFARKEEWNVLCDTLASRLLGVGDTLAATLCYICAGNIDKAVEIWSRDLKSEDGGKTYVDLLQDLMEKTITLALATGHKSFSASLSKLVENYAELLASQGLLKTAMEYLKLLGSDEHSHELAILRDRIAFSTEENHAASTSVHAGSINSSAYPTIQPSYSTPDPSQNLYQGTSQYAVPSNQYQDYQQQSNTAYGTYNSTYSQQPTQMFVPSNTTPVISQPNATPAPVPQQPVKAFTPTNLPGLKNPEQYQQPTLGSQLYAGANPPYTSGQSTPYQGVPPTTYHQPRPPTQFQTVPTAPPAVSSATVPGTTPSQMFPGPVANNPTSRFMPSNNPGFVQRPGLSPVQPSSPTQAQGQPQPVVAPPAPPATVQTADTSKVSAELKPVIATLTRLFDETSKAMGGSQVKKREIEDNSRKIGTLFAKLNSGDISPNVSSKLIQLCSALDSGDFATAMHLQVLLTTSDWDECNFWLAALKRMIKTRQNFRM

SEQ ID NO: 53810 - protein, 364 aa, Oryza sativa
MDDNVENYINFLSDDCLICIFNKLESESDRNAFGLTCKNWFKVRNIARKSIIFHCSFNPKVYKEHANCLSKLLARSPYLNLVSLAGLTELPDTALNQLRISGASLQSLSFYCCSGITDDGLEVVSIGCPNLVSLELYRCFNITDHGLENLCKGCHALKSLNLGYCVAISDQGIAAIFRNCPNISTIIIAYCRGLSGVGFRGCPGTLSHLEAESCMLSPDGLLDVVSGGGLEYLNLYNLKSPTGLDGLDRVGYARSLRFLNLRMCRYLTDDSVTAIASGCPLIEEWSLAVCHGVRLPGWSAIGLLCNKLRILHVNRCRNICDQGLQALGDGCVCLQVLHIHGCGKITNNGLASFSIARPQCETKG

SEQ ID NO: 53811 - protein, 143 aa, Oryza sativa
MLERDFAPPPRSCVLPPRCCILVLCPPRSRGPLSPPSPLPLPTPTSSPAAAGPIRRGRHRGRPLPPLPPPPSPRCTPPLASRCPPHSPPTKPRSSLAAATAAAELHRCHRLLPYYTEKLKKHHKFSPVVELSPGNVVECLWLT

SEQ ID NO: 53812 - protein, 1092 aa, Oryza sativa
MEASAGLVAGSHNRNELVVIRRDGGGGGGVGGRRAAEAKAACQICGDDVGEGPDGEPFVACNECAFPVCRNCYDYERREGSQACPQCKTRFKRLKGCPRVAGDEEEDGVDDLEGEFGLDGREDDPQYIAESMLRANMSYGRGGDLQPFQPIPNVPLLTNGQMVDDIPPEQHALVPSYMGGGGGGGKRIHPLPFADPSVPVQPRSMDPSKDLAAYGYGSVAWKERMEGWKQKQERMQQLRSEGGGDWDGDGDADLPLMDEARQPLSRKVPISSSRINPYRMIIIIRLVVLGFFFHYRVMHPVNDAFALWLISVICEIWFAMSWILDQFPKWLPIERETYLDRLSLRFDKEGQPSQLAPVDFFVSTVDPSKEPPLVTANTVLSILSVDYPVEKVSCYVSDDGAAMLTFEALSEASEFAKKWVPFCKKFNIEPRAPEWYFQQKIDYLKDKVAASFVRERRAMKRDYEEFKVRINALVAKAQKVPEEGWTMQDGSPWPGNNVRDHPGMIQVFLGQSGGRDVEGNELPRLVYVSREKRPGYNHHKKAGAMNALVRVSAVLSNAPYLLNLDCDHYINNSKAIREAMCFMMDPLVGKKVCYVQFPQRFDGIDRHDRYANRNVVFFDINMKGLDGIQGPIYVGTGCVFRRQALYGYDAPKTKKPPSRTCNCWPKWCCCCCCGNRHTKKKTTKPKPEKKKRLFFKKAENQSPAYALGEIEEGAPGAETDKAGIVNQQKLEKKFGQSSVFVASTLLENGGTLKSASPASLLKEAIHVISCGYEDKTDWGKEIGWIYGSITEDILTGFKMHCHGWRSIYCIPKRPAFKGSAPLNLSDRLHQVLRWALGSVEIFFSKHCPLWYGYGGGLKFLERFSYINSIVYPWTSIPLLAYCTLPAICLLTGKFITPELTNVASLWFMSLFICIFVTGILEMRWSGVAIDDWWRNEQFWVIGGVSSHLFAVFQGLLKVLAGVDTSFTVTSKAGDDEEFSELYTFKWTTLLIPPTTLLLLNFIGVVAGVSNAINNGYESWGPLFGKLFFAFWVIVHLYPFLKGLVGRQNRTPTIVIVWSILLASIFSLLWVRIDPFLAKNNGPLLEECGLDCN

SEQ ID NO: 53813 - protein, 114 aa, Oryza sativa
MTGKAKPKKHTAKEIAAKIDAATTNRGGGKAGQKDRLGQDKGGHAKLECPLCKTTAPDIKSMQIHHEARHPKLPFEPDKLNNLHGGGAGAAAAAGEAAASSSKPKPGVRGSLKK

SEQ ID NO: 53814 - protein, 580 aa, Oryza sativa
MSSAAGGGGGYGGGGGEHQHQQQQHHLLLGQAAGQLYHVPQHSRREKLRFPPDHPAESPPPPPPGSWPLPPAFYSYASSSSSYSPHSPTLAHAQLVAHGMPPGAATSGGAQIPSQNFALSLSSASSNPPPTPRRQFGGGGGGGGAAGPYGPFTGYAAVLGRSRFLGPAQKLLEEICDVGGRPAQLDRGSDEGLLDVDAMDAAGSVDHEMDGSDRAVADAVTVSGAEQQWRKTRLISLMEDVCKRYRQYYQQLQAVVSSFETVAGLSNAAPFASMALRTMSKHFKYLKGIILNQLRNTGKGATKDGLGKEDTTNFGLMGGGAGLLRGNNVNSFSQPHNIWRPQRGLPERAVSVLRAWLFEHFLHPYPTDSDKQMLAKQTGLTRNQVSNWFINARVRLWKPMVEEIHNLEMRQLQKNPSLDKNQLSMQHTQHSSDSSGKPCDPSNSLQGQSSSMTRNHSISASRHIEDGLSQMPHDISGQVSFAYNGLAAHHSIAMAHHHQPDLIGTGGAANAGGVSLTLGLHQNNNRAYIAEPLPAALPLNLAHRFGLEDVSDAYVMSSFGGQDRHFTKEIGGHLLHDFVG

SEQ ID NO: 53815 - protein, 206 aa, Oryza sativa
MQITPRTELMRGICTSSTQPSLYSTMYGLLRLAIRDICAANSKQSIKIKSSNQTICPVVPNIQSDATANNSWVQHVCSSVGNEQELTRVSIWFTSWYAVRWNLSFCLDSRIFFITYLHHHRAKKEQKHQGSLKKTKEEEERGAEEGGEPLALALVDDEVCGAVGAPADLLHHLVLLHGSGSGSGSAPRPGGLNCPCRYLYLETNRV

SEQ ID NO: 53816 - protein, 862 aa, Oryza sativa
MAGEERPERIVVSVRLRPVNAREAERGDGSDWECAGPTTLTFRGAVPERAMFPASYSYDRVFSHECGTRQVYDEGARQVAMSVLSGINASIFAYGQTSSGKTYTMVGITEYSMSDIYDYIEKHPEREFILKFSAMEIYNEAVRDLLSSDATPLRLLDDPEKGTVVEKLTEETLRDKGHLLELLAVCEAQRQIGETAMNEASSRSHQILRMTVESSAKQFLGKGNSSTLIACVNFVDLAGSERASQTASAGMRLKEGSHINRSLLTLGKVIRQLSKGRNGHIPYRDSKLTRILQSSLGGNARTAIICTMSPAHCHIEQSRNTLLFANCAKDVVTNAQVNVVMSDKALVKHLQREIARLENELKFPASASCTSHAEILREKDELIKNLEEQLKELMEQKDTVQSQLDNFRKVASDGDINNHLARRWSRSSDSIPRIVSEGAFSSSDTQDIDYQDQTMDELSVPHSFPPSSQISDITEEHEAQRVAHRAESEPPEEHCKEVQCIETNKLRSRRSQEFFQTPEKKTHTDGQKHSESMSNSAENAIKLYACDFEPSFDLEKPETEESLALKRCVVSSRDSALTRSRSCRASFMVIPNSWFDDSASTTPSSETFRYSTRRPEKVRKSLSPDEIADKSTGNAEEDKSTCNAEEETAVNDIGCVTEVKQKTEMNHAPQSSEQHQPKIAKEVATVSLSKWHIDFERKQQEIIELWHDCNVSIVHRTYFFLLFKGDQTDSIYMEVEHRRLSFIKNSLIADGELHATTASSLRNLRHERDMLYRQMVRKLHLAEKERLYGKWGIDMSTKQRRLQLSRRIWTQTGMDHVRESAALVAKLVEHLEKGQAIREMFGLSFSFKPRRSFSWVGVYSRD

SEQ ID NO: 53817 - protein, 213 aa, Oryza sativa
MNAPRCLFGSASFGEKAIVAGGMDAQGRVLRSAELYNSETKRWITLPCMNKARRMCSGVFMNGKFYVIGGMASNTEVLTCGEEYDLEKGTWRVIENMSEGLNGASGAPPLVAVVENELYAAQYAGKLVRKYNIKDNTWTTLGELPERPEAVNGWGIAFRGCGERLLVIGGPRVMGGGMIELHSWIPREGPLRWNMIGSKPSGNFVYNCAVMGC

SEQ ID NO: 53818 - protein, 388 aa, Oryza sativa
MVSTSGDTLSESSTLSVYRDELFAMADIVTPNVKEASRLLGGVSLRTVSDMRNAAESIYKFGPKHVLVKGGDMLESSDATDVFFDGKEFIELHAHRIKTHNTHGTGCTLASCIASELAKGATMLHAVQVAKNFVESALHHSKDLVVGNGPQGPFDHLFKLKCPPYNVGSQPSFKPDQLFLYAVTDSGMNKKWGRSIKEAVQAAIEGGATIVQLREKDSETREFLEAAKACMEICKSSGVPLLINDRVDIALACNADGVHVGQLDMSAHEVRELLGPGKIIGVSCKTPAQAQQAWNDGADYIGCGGVFPTSTKANNPTLGFDGLKTVCLASKLPVVAIGGINASNAGSVMELGLPNLKGVAVVSALFDRPSVVAETRNMKSILTNTSRT

SEQ ID NO: 53819 - protein, 495 aa, Oryza sativa
MMRGFTDEKQNPLLYASTYHAGECLDPVAVAQAKAKRKAQKLDIVSHPNTNEGRDDTSDDKAHHGSSELPPRTELIGSKQMAIEGFKAQSEMVIDSLDRLITSWEEQKQSVIVEGVHLSLNFVMGLMKKHPSIIPFMVYIANEEKHMERFAVRAKYMTLDPAKNRYIKYIRNIRAIQDYLCNRADKHLVPKINNTNVDQSVAAIHATVFSCLRRREAGEQLYDLNTNTVAVVNEEYRNQRAANSLGSKGMFQLIQRQGSSRNLMAILNTDGSVTKAWHVDKNNGNGSLDGTSSDKSTKNPMYDTFGKAEPVNLQFGSFGISAWMSDTGGTSHTGSVDDLRADGIETGGRYYSSCCSSPKVSDCPSKELMEDDYSVFGSEEDADDPPDAGTDEDLTDEERDMHEIEAGSVDEHSTKSDEEYDDLAMQDVMENGYWSDDEQAASSTKNSSNQEKNIHGAADGDVVDDEGSGNDRFHHNLAFFLKMSKKVAATELPCA

SEQ ID NO: 53820 - protein, 438 aa, Oryza sativa
MHSRHQRLASLTKLLTSHVNVGRHRDALAFFSRMVSDPSLPPLSDPSFAYAFPLALKSSSALRLPSAAAAADSLHALAAKCGFLSSPFFASALVASYGACASPALARRLFDELPHRNAIVCSAMISVHIRSGDLAGALRELDLMDVAPTASCFNSVIAAVAESGEHPARAIDLYRRMQRMGVLPSLITLLALVPSCTALGALSSIKEVHGFATRHGMFASCHLGSSLIEAYGRCGSLAGARNVFDQVQERDVVVWSSIVSAYAFHGHADVAMSLFRHMELDNVRPDGIMFLGVLKACGHAGHADDALKYFDVLTKIFGVEACGDHYSCLVDVLGRAGRLRQAYDVIQTMPVKVTAKAWGALLAACRKYGEVGLAEVAGRALFEIEPENAGNFVSLANIYSGMGMHDKAEQVRREMEQRGVRRLPGSSWMIHCKSSELF

SEQ ID NO: 53821 - protein, 222 aa, Oryza sativa
MRPNVITEAGISTRLNQWWGSIPFITSGVILICGAIYLVCLLTGYDSFAEICFLPSVVASRFQVYRFYTSVVFHGSLLHVLFNMLALVPLGTELERIMGSVRLLFLMFLLATTNAIFHLIIAFLAAYNPLYPLHFLVDECSIGFSGVIFSVIVIETSLSGVQTRSVFGLFNVPANWYAWILLVLFQFLASNVSLLGHLCGILSGYLWAVQLLASWTIILFFY

SEQ ID NO: 53822 - protein, 381 aa, Oryza sativa
MDDNVENYINFLSDDCLICIFNKLESESDRNAFGLTCKNWFKVRNIARKSIIFHCSFNPKVYKEHANCLSKLLARSPYLNLVSLAGLTELPDTALNQLRISGASLQSLSFYCCSGITDDGLEVVSIGCPNLVSLELYRCFNITDHGLENLCKGCHALKSLNLGYCVAISDQGIAAIFRNCPNISTIIIAYCRGLSGVGFRGCPGTLSHLEAESCMLSPDGLLDVVSGGGLEYLNLYNLKSPTGLDGLDRVGYARSLRFLNLRMCRYLTDDSVTAIASGCPLIEEWSLAVCHGVRLPGWSAIGLLCNKLRILHVNRCRNICDQGLQALGDGCVCLQVLHIHGCGKITNNGLASFSIARPNVKQRADEVMCIGPSIEDLFRLQ

SEQ ID NO: 53823 - protein, 924 aa, Oryza sativa
MEEKAAAAPPWEPSVGTVFRRLAGAGDSGRSPEASLPSPSSSGNGVATRISNLHGVKRKPFVARLTADIIQTFVRCNPAFKYSESLNPKIFLTNPSTPAHNDGLDNANWDLILYVNLELVNRTSNRRFVVKEMLGQGTFGQVVKCLDTETNDYVAVKVIKNQPAFYHQALVEVSLLRALNQTHDPDDQYNIVRMLDYLLFQNHLCIAFEMLGQNLYELLKRNSFRGLKMKFVRAFSKQILDAMVVMRGARIIHCDLKPENILLTPSVTTDAAVKVIDFGSACLEGKTVYSYIQSRYYRSPEVILGYPYNTAIDMWSFGCIVAELFLGLPLFPGASEYDVLQRMVKILGGQPPDYMLREAKNSAKFFKHVGSIYRGNEVHDGIGSSYRLLTEEEIEVRESEKPKVVKWYFPQLRLDQLICSYPWKNSELTETEKAERVILVDFLKGLLKFDPNERWSPLQASCHPFITGEPFTGPYEPIPETPKIPIGRAAAVEHNPGGGHWLAAGLSPQVGSVNRSLPPNNPYPPKIPYSYGSSYGSFGSHGSYVGNAGHASSYGSFGDGNAVNMYYSPLGPGFKQIESSPDVRLRPRFSHDRGIRLSPGSTGPMSLGASPSQFTPPNYQMQIPSNSTGMHGSGSPASGGIHGSPLGKTPSSYSKRRGLPMPPHEYPSQHGQGRHGDGVGFSHSDANVRGHPVYSQNSIPSSGYSSWRPQIGSGSFSLEASSSHGPSQTFHSHFAPRLQTLDNLSDSSAASTLDNAYWDPYFSDESLLHEDNSLSADLSSSLHLGDSANPTSGSARTANVQSHIFMGSNPLPAGESYRADHFFHASSRGSLGGNTHSAVPVNYGGYNPVNHPQQNPQIRHGQPYIQHRYNQATSTHNHPRGSHHNRQPAWPMADGTPWGGTSGHPFTTTGLPSSLPRKDYGSIF

SEQ ID NO: 53824 - protein, 167 aa, Oryza sativa
MDAAMATEINQSTGRLRYCWSNICLHMFTLDFLNQVANSLEKDSTYHLAEKKIPSIHGYAMGLKLEQYIFDAFSYSPSTALFEVLREEEFAPVKNANGASYDTPDSAKLMLLRLHSRWVVAAGGFLTHSVPLYMTGVEVSPLSSYAGENLEAICRGRTFHAPSEISF

SEQ ID NO: 53825 - protein, 350 aa, Oryza sativa
MGLQQSKEELVYQQVNYGNADGIRALRAQGAGLEWIDKEGKTPLMVASMRPDLINVVQVLIELGANVNAYRPGSYCGTALHHAAKKGLEQTVHLLLSHGANPFITNDDCHTALDLAREKGHVNVVRAIEGRISLFCGWMRENYGPGFLEAFAPQFLTRKIWAVILPREARNQTRPLKLELTIYPELQASKPQAVIKLWKCQLEEPKFNQANPSVTIFDKGTRTRYKLLPVCEGDKQQLQWFYSACCGIPQVASMVPAQPANAPLPNPSSASSLPSVISTPSKEDAELAMAINASILSAIAEGVPDVQPITTTTATNDWGNSKQLPQWMGPTRYFCAFKDKWPSTSCYIKQ

SEQ ID NO: 53826 - protein, 463 aa, Oryza sativa
MASSAGDPLLSGEAGDGRRRFVPSTIRLKTSVWSELGGAVGDLGTYIPIVLALSLASHLDLGTTLIFTALYNFATGLLFGIPMPVQPMKSIAAVALSSAHLTIPQIMSAGLAVAAILLFLGVTGLMTTLYRLLPLPVVRGVQLSQGLSFAFTAVKYIRYVQDFSRSSSASTSVPRPLLGLDGLVLALAALLFIILATGSGDDEDVNRDGTSRRRRSCSRVPAALIVFALGLVLCFVRDPSILQDLRFGPAPLGLVKITWDDFKIGFWEGAVPQLPLSVLNSVIAVCKLSSDLFPERAELSPARVSVSVGLMNFVGCWFGAMPCCHGAGGLAGQYRFGGRTGASVVFLAIGKLALGLVFGNSFVTILGQFPIGILGVMLLFSGIELAMASRDMGSKQESFVMLVCAGVSLTGSSAALGFISGIVLYLLLRLRDLEWDIRGLLGRWAAGRRQSTNEANEDGAGDA

SEQ ID NO: 53827 - protein, 572 aa, Oryza sativa
MVPDGGEGHEIVEVAGEPGAPSSTMRLMDFIPIYIPTVETGALSRSVRKRRFLDFLRAHPSRDWFLRSTFVGRLRHRGQGQAASGDDEEVDSDGGRRRPRRRFRVPFVRKIKWGKLWSYAVSWCRKPENFAMIIWLAFVAAGLLMLFMLMTGMLDSAIPDDEQRKKWTEVINQILNALFTIMCLYQHPKIFHHLVLLLRWRPGAGADREEIRKVYCKDGAPRPHDRAHMLVVVVLLHATCLAQYFCCALFWSYARKERPDWALNIGYGLGTGCPVIAGLYAAYGPLGRKQHEDSDEESAAAQAGGGNRPAENDREVEIKIYNRRVVVSSPEWSGGLFDCCDDGTVCALSATCTFCVFGWNMERLGFGNMYVHAFTFILLCVAPFLIFSVTALNVHDDDIRDTVVSVGVLLGLCGFLYGGFWRTQMRKRYKLPASGCGCGCECGAGGQGHACRAAVSDCAKWLFCWSCALAQEVRTANFYDVEDDRFVFHGARNEDGRAVLVPLPREASTATAHSRSMSCPPKIDAVAALSGASPLGVQMAAINMERSATYSGEHHPAAMRPPVPPLMQMDQE

SEQ ID NO: 53828 - protein, 601 aa, Oryza sativa
MMGALQQQSNGHGHGVLLLAEAGYAEVDPTGRYGRFNEILGKGSSKIVYRGFDEWRGVEVAWNQVRLRDVVRGGGELERFYGEVHLLAALRHRGIVRLHAYWVDAPRRALNFVTELFVSGTLRQYRERHRRVSAAAVRRWCAQILDGLAYLHAHSPPIIHRDLKCDNIFVNGNQGEVKIGDLGLAAFRRGGGHARCVGTPEFMAPEVYDESYDELADVYSFGMCVLEMVTLDYPYSECSNPIQIYKRVISGIKPAALYRVSDPVVRQFIERCLAPAARRPAARELLDDPFLLPLEDDGFFSGDGGDGHGGFGVGYYNLMYNYLHQPACIDDHHACSNGGLSPSNSVGDNDVDAAVQRGDDDGDNWLRDIHMLFDEDDDDAAAADANERVGGVDITIKGRRTDDGGVYLGLRIADKNGTGRGRIICFRFDTEADTAMTVAAEMVAELDITDHEVTRIAQLIDGKVAALVPGWRPGPATDDDDDDDLVGGGDDPDAPGGAAAACCKNCRPAASSSSSCGSLVDFMSSAAAAERHGCRRCAELHGRFEEITFQADDDEEEQHLQGSSSDTGGSNHEQHAMGKDKEVMNINGIAQDGTVQGSEQP

SEQ ID NO: 53829 - protein, 431 aa, Oryza sativa
MRNLHPPMMKMLLAALVVVAAASFRAAEAALPSMAVGVNYGANADNLPPPKDVAAFLAAHTTIDRVKLFDANPAFISAFANTPISLAVSLPNSDLPSLADKQTGLDTARAWVRANLSPYVPATNVTLLLAGNEILLSPDPNLVLSLLPAMRRLAQALRLEGLTGVRVTTPHYLGILAPSDGIPSNARFRPGYDTKLFPPMLQFHRDTGSPFMMDAIYTAMKRLGYGDVDIAVGEAGWPTQADPGQVGVGVEEARDFNEGMLRVVSSGKGTPLMPNRKFETYIFSLFDENQKPGPIAEKHFGILNPDFTPIYDLGLLRQSSDSGAPNPSPNPSPNPSPKPAPSGGGKWCVPKAGASDTDLQNNINYACGYVDCKPIQSGGACFDPNNVQSHAAFVMNAFYQANGRHDYDCDFKGTGAVTSNDPSYGSCKYVS

SEQ ID NO: 53830 - protein, 353 aa, Oryza sativa; identical to SEQ ID NO: 53792

SEQ ID NO: 53831 - protein, 681 aa, Oryza sativa
MDKIDCYVVPQTTGTGRNIFQGGSPLSASLPLLGVQLVLIVAVTRVLYFLLKPLKQPRVVSEIMGGIILGPSVLSRHAAFREVVFPARGEPVLNTVATFGLMYVIFLIGVRMDPRLVVRSGRKGVVIGLSGFLLPLAMTGAGSSGEAMATEPDVSRRSTFLFALATSLSVTSFAVLSPILSELSLLNSDLGRIAMSASMTTDGIAWIIMVVYILAEAFLVSPATSIWAFLSLAVLAAFILFVVRPVALRVIERTPPGKPVEETYVFVFLLVVLLVGFYSDVIGTNSFHGALMLGLAIPDGPPLGTALGEKIEAMVSGLILPLYYAMTGLSTDVWRMHWGRLQVVMFLAWVGKLVGVMVSSLYLEIPLRDAVSLSLFMNSKGIVEVITFNFFLTNKLIGKNTFSILICLSVAITAVSVPVAGWLYDPARRYAVYKRRTVQHLKADADLRILACVHDQSHVPGTLAVLEASNATPQTPLSLYLLQLVEIAGRSAPVFIPHKLRHSASRAGAAAASAAPPTDSDRIINAFFQYELKHPEGAVSVHPFTTISPYSSMHDEVCRLAVEKRTSLILLHYHKRHISPAACAPPWGSASSTARCWRSRRAPSRCSSTATPGASASAPSSRARCKTNRRPPGAGAAGTRPAAAAKASRRPSRRSSSAAATTARRWPTRRAWRATRAWRWA

SEQ ID NO: 53832 - protein, 367 aa, Oryza sativa
MRRRRMGALHVGEPRVSFQQQQQQQVGKNGQQGHGHGAVVEEIHGLIKVYRDGFVERIPAIPDVPCTWGTTASVPGVVIARDAVVDRATRVWARLYAPAAAAAAGRVPVVVYFHGGGFCVGSAAWSCYHEFLAKLAARAGCAVMSVDYRLAPENRLPAAFDDGVTAVRWLRQQAAISSAADELSWWRGRCRFDRVFLAGDSAGATIAFHVAARLGHGQLGALTPLDVKGAILIQPFFGGETRTASEKTMPQPPGSALTLSTSDTYWRMSLPAGATRDHPWCNPVTGRGAPRLDSLPLPDFLVCISEQDILRDRNLELCSALRRADHSVEQATYGGVGHAFQVLNNYHLSQPRTQEMLAHIKAFVRAR

SEQ ID NO: 53833 - protein, 289 aa, Oryza sativa
MGDHEARGDDFEKKAEKKLSGWGIFGSKYEDAADLFDKGANSFKLAKNWSRAAQVYIKIANCHLKGDSKHEAASAYVEAANCYKKFSPQEAAQALNQAVDLFLEIGRLNMAARYCKDIGEIYHQEQDLEKASDYLEKSADLFDSEGQSSQSNSIKQKVAEIAAQLEQYQKANEIFEAIARQQINNNLLKYSVRGILLNAGICQLCRGDVVAITNSMERYQDIDPTFSGTREYKLLSDLAAAMEEGDVAKFTDAIKEFDSMTRLDPWKTTLLLRAKNELKKKEDDEDDLT

SEQ ID NO: 53834 - protein, 67 aa, Oryza sativa
MANPGGFSTQSAAISRRRRTPLRRPMLLQLSGASRDLMTRMATGTQIAMLGMTWFLPSETEVTATVS

SEQ ID NO: 53835 - protein, 102 aa, Oryza sativa
MESPTKVDDEQWLAYWILYSFITLLEMVAEPVLYWIPVWYPVKVLFVAWLVLPQFKGASFIYKKLVREQLRKYRARGGAAATVTAGEDHKVHIAKAEHDHGH

SEQ ID NO: 53836 - protein, 597 aa, Oryza sativa
MAKPSATSAAAAPPAARVLIGASVNVAFLLLLAFFFFISPRGGSPPEVVSSSKEVGIRGRRDGGGSGGGGVFRVESYGERCEHVGEEDGLDRRRFPRGYVDYLYLFDCVFGEERRVLGYAVMAAWLAVLFYLLGDTAAVYFCSSLEGLSRLLRLSPAIAGVTLLSLGNGAPDALSTIASFASGGGEGETTAVGLNGVLGSAMLVSSAVLGVIGVRLGARGVAVDRVDFYRDASFLLAALAAVAVVLAAGEVTIWGALAFTSLYVVYVVAVAFTHGRAPSKGHGAEADHTADAFSELCNVAETKFYGDQEPLLPDTAPLLSYYPGDGDGDGGGGGGGSKKKIRSAFWSVLRALELPLWLPRRLTIPDASKERWSKPAAVTAVTMAPVLLSHLCSRATGITSPLAVLLGVLAGASLGAVAFFTTSPDAPPADHLAAWLAAGFVMSVAWAYAVATELLALLVSAAHVMGVDSAALGLTVLAWGNSLGDLVANLAVASRGGGGGGAQVAVAGCYGGPVFDVLVGLGVSMLLSSWASHPRPVAMPAEAGPFQTLGFAAAGICWAVVVMSRRGMRVDRTLGFGLLAIYLCFLCINISQALGPV

SEQ ID NO: 53837 - protein, 384 aa, Oryza sativa
MRGSLEVHAIGRHAASPCALRLKALPALDMMRYQRLSPDCLPLANGGGGGSGSVTRKPASRSCKDDDGGMAVAADSSRLSSYLPSSQLDSKPLRARAPQPSSSSAAAWSPARDHAHAHHNHHHHHHPSDSSDTASPSSNGAGTGGDVLLQWGHNKRSRCRRDASSSANAAPSSSQRRQTASAAGKILRRSSAPAEKLMPPPPPSTTTGSYTRGSNLRSASSFPTRSAAAAAVGDAHHHRSAVEERSGGGYKRSPDKAHKSALDAALHMDSKNNHHHHHHDSSVTANGGAGAGEKIGSERFELPRIYISLSRKEKEDDFLIMKGTKLPQRPKKRAKNVDKTLQYVFPGMWLSDLTRGRYEVREKKCVKKRRRGLKGMESMDSDSE

SEQ ID NO: 53838 - protein, 418 aa, Oryza sativa
MDKMMRTVIAAVVVGLLAAAHTATTAPEQSYGGATATVAPKQPAAGEDVNKALAAETAAAEAEDAAEEEDAAAALVTGFTAGAANSAPGVTAVMKPVLEKADAGQFYQDVPWIPDPNDEGNPPKSLPAAQVLPAKGGAGAAGSSPPSKEVQVDYYATTQPKKPEEPPTVAAVQKDNCVPPAAPKPAVPATPSTSPPSNKEYAPAAPGVVPVNQPSSPAAPAGVVPAPVQPSSPAAPAGVVPAPVQPSSPATAVPKPPSNDPYAPATSNTPAAEEQKDGLNEKAISDIVREHNMFRTREHVPPIVWNATLAKYAQEYADLRRGDCQLEHSHGPYGENMMFGTGKQWTWKKTVDEWSDEKKSYDYKSNSCKAGAMCTHYTAIVWKNTTAVGCGRVVCTSGDTIMVCSYWPPGNYVGVKPY

SEQ ID NO: 53839 - protein, 297 aa, Oryza sativa
MQHIPLWVLKWQGLQNRVVFVTVITDLNTCHPTWFHADVNRCYCPSEEVAKRAALDDLQPSQIRVFGLPIRPSFCRAVLVKDDLRKELELDPELPAVLLMGGGEGMGPVKKTAKALGESLFDKELGKPIGQLIVICGRNKTLSSSLQALEWKIPIKVRGFETQMEKWMGACDCIITKAGPGTIAEALIRGLPIILNDFIPGQEVGNVPYVVDNGAGVFSKSSRETAKLVARWFGPDSDELKRMSEKALKLAQPEAVFDIVRDIHELSREQGVISQISSSLTSSFFIPSPETTPIQLM

SEQ ID NO: 53840 - protein, 329 aa, Oryza sativa; identical to SEQ ID NO: 37132

SEQ ID NO: 53841 - protein, 664 aa, Oryza sativa
MQPTGRGGWAKDGGNISSYSSDGFQPNQNTRLGNNTTGNHNIRTDSTLASNLNNTTNNSGTSPGIVQAPQTNSAPQTSSAPAVSLPAMLKDIAVNPTMLMQWIQMEQQKMSASEPQQKVTASVGMTSNVTPGMVLPLGNAPKTTEVAAVPSVRPQVPMQSAPMHSQNDTGVIRMKPRDPRRILHSNIVQKNDTVPPVGVEQAKSNGTAPPDSQSSKDHLLNQDQKAEQLQAIALPSLPVTSSARPVTMNANPVSNSQLAATALMPPHGNTKQTSSSVNKADPRLAAGQNESNDDAATSTGPVTAPDAVPPASPYGDVDHLLDGYDDQQKALIQKERARRIKEQHKMFAARKLCLVLDLDHTLLNSAKFIEVDHIHGEILRKKEEQDRERAERHLFCFNHMGMWTKLRPGIWNFLEKASKLYELHLYTMGNKVYATEMAKVLDPTGTLFAGRVISRGDDGDPFDSDERVPKSKDLDGVLGMESAVVIIDDSVRVWPHNKHNLIVVERYTYFPCSRRQFGLPGPSLLEIDRDERPEDGTLASSLAVIERIHKNFFSHPNLNDADVRSILASEQQRILGGCRIVFSRIFPVGEANPHMHPLWQTAEQFGAVCTNQIDDRVTHVVANSLGTDKVNWALSTGRFVVHPGWVEASALLYRRASELDFAVK

SEQ ID NO: 53842 - protein, 330 aa, Oryza sativa
MAQLPPKIPAMATAWPEFGGGHHHHAAHGHHHQRSPSMGAFLAAPLPPFPLPPPAPANGGAQQQQQQQQHQPSWVDEFLDFSATKRGAHRRSVSDSVAFLDPVSDDNAGVGAHDFDRLDDDQLMSMFSDDLQPPPPQQQPAAPAASASSPSDHNSMNDEKQDKGETDEAQSECDGATPGQPASPATVDPKRVKRILANRQSAQRSRVRKLQYISELERSVTSLQTEVSALSPRVAFLDHQRSLLTLGNSHLKQRIAALAQDKIFKDGGTEEGDREAAANLPPAKPQERGIPTGGRGPGPRPRQCRPDRQRGGRRGRAMPALVIGRDPDAL

SEQ ID NO: 53843 - protein, 821 aa, Oryza sativa
MLRLLRHARRHSTSSSSSAAAAAVPLTSPAFAVFGANTGVGKTLVSAGLVASLLASPSPSPSTVAYLKPLQTGFPDDSDARFVFDRAPALLRRLRLAGGGASTRLVASNHTLFPSPAVDPLPERQDTVVNYGGEEGVEEKALVCRTVYAWREPVSPHLAAEREGMPVEDEEVRWLVDRWLAEEDGGGEVWKVLETAGGVASPGPSGTLQCDLYRSSRLPAVLVGDGRLGGISSTLSAYETLLLRGYDVGSVILEDRGLSNDRFLLSYLRKRVPVHVLPPIPEDPKDDLTDWFSESSSAFSSLKDSLQSFHSRRVQRLNSMQRKSKYLLWWPFTQHDLVPVDSVTVIDSRFGENFSAYKVKDKTIVPQFDACASWWTQGPDSNLQIELARDMGYAAARYGHVMFPENVHEPALRCAELLLGGVGKDWASRVYFSDNGSTAIEIALKMAFRKYACDHGIIVDSEKDIRSEGSVHFKVLALNGSYHGDTLGAMEAQAPSAYTSFLQQPWYSGRGLFLDPPTVYIKNKSANLSLPPSIMHDQLSSCDTCFSSLTEVFCKTRDTSSAANVYVSYISQQLSQYAMSNNSEHIAALIIEPVIQGAGGMHLIDPLFQRLLVKECKNRKIPVIFDEVFTGFWRLGVESASELLGCFPDISCYAKLMTGGIVPLAATLATEPIFEAFRSDSKLTALLHGHSYTAHPMGCTAAVKAIQWYKDPSTNSNIDLDRMKLKELWDSALVNHLSSLPNVKRVVSLGTLCAIELKAEGSDAGYASLYASSLIRQLREEDNIYARPLGNVIYLMCGPCTTQDSCTRQLAKVHRRLQKLN

SEQ ID NO: 53844 - protein, 376 aa, Oryza sativa; identical to SEQ ID NO: 48646

SEQ ID NO: 53845 - protein, 582 aa, Oryza sativa
MAVRYEKKAMCALLLSLIMVALSVAAAGDGDAPPSTPVSPTTACNDTTDPSFCRTVLPPRGSSDLYTYGRFSVARSLDSARRFAGLVGRYLARHRGLSPAAVGALRDCQLMSELNVDFLSAAGATLRSAADALPDPQADDVHTLLSAILTNQQTCLDGLQAASSSWSERGGGGLAAPIANGTKLYSLSLSLFTRAWVPTAKGSKHHGGGKKPHQGHGKKQPPAAAASMRRGLFDAADGEMARRVAMEGPEATVAVNGVVTVDQGGGGNYTTVGDAVAAAPSNLDGSTGHYVIYVAGGVYEENVVVPKHKRYIMMVGDGVGQTVITGNRSVVDGWTTFNSATFAVVGQGFVAMNMTFRNTAGPSKHQAVALRSGADLSAFYGCSFEAYQDTLYAHSLRQFYRRCDVYGTVDYVFGNAAVVFQSCAFLSRLPLPGQCNTVTAQGRSDPNQNTGTSIQGCSLLAAPDLAAAGDGGRTLTYLGRPWKNFSRTVVMESYVGGLVDPAGWMPWSGDFALDTLFYAEYNNSGPGADTSRRVAWPGYHVLGAGADAGNFTVTSMVLGDNWLPQTGVPFTSGFLTSDPPIS

SEQ ID NO: 53846 - protein, 232 aa, Oryza sativa
MIDDDEEAALWSRRNTPVEHPIRRAYDRVAAALREKRSNERLARECLDHYNALHPGDEHDLAPGGDVTLSRWHCSTGAWTHGNFVARRRRRQWRRCLAFVLPATRTLFFFEHMSGDDYLGVITCIPMPDEPVGGFLARIPVIRRWATPRRSGRWDCVCKTCRRGLRVTHHWLKRKVIGEFPCGHMVAESVCKMCYHYSDVVHPSPGKFARGYLEHEDEFGHYGRNGLRDYPC

SEQ ID NO: 53847 - protein, 611 aa, Oryza sativa
MDPEKRGYRLQEFVAHDAEVRSLSIGKKSSRVFITGGSDRKVNLWAIGKQTPLLSLSGHTGSVEAVEFDTAEVLVLAGSSNGSIKLWDLEEAKVVRSLTGHRSSCTSVEFHPFGEFFASGSSDTDLKIWDIKKKGCIHTYKGHRGAIRIIRFAPDGRWVVTGGEDNIVKVWDLTAGKLLHDFKFHSGQIRCIDFHPQEFLLATGSADRTVKFWDLETFELIGSAGPEATGVRSTVFHPDGKTLFCGLDQSLKVFSWEPVRCHDVVDMGWSNLADLSIYEGKLLGCSYHECRVGVWVADISLIGPYALGVLPKANFFAELVHSLDDNPSKTIDTTAKSIPALATTHPKNLYKVKETGTAESGIRGSNLTPASMDKTKRDKSGATPRRPDSSFKSSIQSSTPMRRMKAADSPYTNRKTVERNFAQRDASLASRTGTADNSSTVKKGHLAESVSVKDIYTTPQTVSVPVVMPRDILEDKTAGSISGGIRGRAAVADDFHAPVHSRKLSVNSFVGDSVNSTKSMLTDPDVCSEGFSGLKFSFGLTPYYKKEEYDNVDKVDSMDKGDNTQMTEKLDRTVSLEHQLQSNDTSEPPCSTTETTKVKYVRGVAVPLGKT

SEQ ID NO: 53848 - protein, 403 aa, Oryza sativa
MAAMPGGPDLAGAGGAVAVAVDAMQVDDPPRASAEEKHGPTIMGGNDPVTGHIISTTIGGKNDEPKRTISYMAERVVGTGSFGVVFQAKCLETGETVAIKKVLQDKRYKNRELQIMRSMDHCNVISLKHCFFSTTSRDELFLNLVMEFVPESLYRVLKHYKDMKQRMPLIYVKLYMYQIFRGLAYIHTVPGVCHRDIKPQNILVDPLTHQVKVCDFGSAKMLIKGEANISYICSRYYRAPELIFGATEYTTSIDIWSAGCVLAELLLGQPLFPGESAVDQLVEIIKVLGTPTREEIRCMNPNYTEFKFPQIKACPWHKIFHKRMPPEAIDLVSRLLQYSPNLRCTALEACAHSFFDELREPHAKLPNGRPFPPLFNFKQELANTHPELVSRLLPEHAQRHSGF

SEQ ID NO: 53849 - protein, 329 aa, Oryza sativa; identical to SEQ ID NO: 37132

SEQ ID NO: 53850 - protein, 389 aa, Oryza sativa; identical to SEQ ID NO: 42084

SEQ ID NO: 53851 - protein, 727 aa, Oryza sativa
MFGDSDGSKDANPGAPPSTTDPPFPNRELTLSSYLCEKPTLASAAAGGGGGAGPSSPPNPAAAAAGDDGKHCVERDFLHLSAPKRGDPPGDDSSVVGGKKPRLDSLQLSLSLNSDGPAAPPSSQPPLASLLQPVPATDGDLRGAAAAAAVPAAPARRTYSATTARTRSINSDDMSYSYSIFSHNPSCSLTHNSTDIYAAGEGTNGSVHSRFNFRPMGDGSVAFATPPLKEGTSSFFPTELPARMAAAAAAAAASAGGSFDGGRGGLHASRPDKILRDIVSDSVTAMAQVLQDFPSERLELLREAVRGMIDSHEKRDELASLQRKLERRSDLTTETLGRANRTQLEILVAIKTGIATFVTGKGRVPSSELVEMFLMTRCRNLNCKSTLPVDDCDCKICSTKKGFCSACTCSVCHKFDCAANTCTWVGCDVCGHWCHVACALERNLIRPGPTLKGPIGTTEMQFQCLACNHSSEMFGFVKEVFNCCAENWNAETLMKELDFVRKIFAGCEDFEGKGLHAKAEEVLSLLGKKIISPLDATNSILQFFKYGVTDYSVTGSTSKGILAAQASQSTDMRSLQTPTITPPKSSFNFKTTTSILDTDALKPSPKPLSIEPHFSTASKEDDSSLETIVKCKEAEAKLFQKLADDARKEVDSYRQIVRSRTQKLEKEYAAKLAKVCFQETEEKRRKKLEELKMLENSHYDYLKMKMRMQTDIQGLLERMEATKKMWV

SEQ ID NO: 53852 - protein, 326 aa, Oryza sativa
MITMDLMGGYGRVDEQVAIQEAAAAGLRGMEHLILQLSQTGTSERSPAPAQEQQQQVDCREITDMTVSKFKKVISMLNRTGHARFRRGPVVAQSSGPAASEPAPVRSSPSAVSRPMTLDFTKAASGYGKDAGFSVSGISAASSSFLSSVTGDGSVSNGRGGGSSSLMLPPPPATSCGKPPLSSAAAAMSAGAGHKRKCHDHAHSENVAGGKYGSTGGRCHCSKRRKHRVKRTIRVPAISSKVADIPADDFSWRKYGQKPIKGSPFPRGYYKCSTLRGCPARKHVERDPTDPSMLIVTYEGEHRHSPSAAGQDHPPAPPPPLALPLA

SEQ ID NO: 53853 - protein, 723 aa, Oryza sativa
MSSHRLLFTQLHLYNLLLLIHVHHATSLNFRFDFSEPGSYCTPGSEIACAGDAYPYAHTIELTKTDISDRNLCSIGRVWYARPVPLWNNTTGEVASFRTTFSFQIKPANLDVSADGMAFFLGHYPSGIPHRSYGGNLGLFNGSNNKNATGTARIVAVEFDTYMNKEWEKDGNHVGIDVNSIVSVAATSPDKNLASGTTMTADISYDSSAEILAVTFWINGTSYHVSASVDMRRCLPEVVAVGFSASTGSSIEVHRVLSWSFNSTLTWMNSSVMPPGAAPVPPETISSEPIMSPGAAPVRTETLSSQSQGKLHGIIAISVAVSFVLVCAFMGFLLRRRLVWKKSNEISDGDCQIELDEIFYSKKELDEIKFAKGVGPKRYHYSELAAATGNFAEEKKLGRGGFGHVYQGFLKTDDQERLVAIKKFSPDSSAQGRKEFEAEIKIISRLRHRNLVQLIGWCDSCMGLLIVYELVSEGSLDKHIYKNARLLTWAERYKIIIGLGSALHYLHQEWEQCVVHGDIKPSNIMLDSSYNTKLGDFGLARLVDHGAKSRTTKVVLGTAGYIDPELVNTRRPSTESDVYSFGIVLLEIVSGRRPVEEPDDSDELFVLSRWVWDLYSKNAVVEAVDERLRCSDDGDDELQMERVLAVGLWCAHPDRSERPSMAQAMHALQSEEARLPALRPQMYKGVPFLAMGEHRYSDLSIGTTTSSSASGTGCTAHSEPTKL

SEQ ID NO: 53854 - protein, 641 aa, Oryza sativa
MACLKLGSRADVFRKQGQDWYCTTGLPSDITVTVGEQSFHLHKFPLLSKSGLLERCIREKIENGDHSCVIDLSDIPGGAKALELTAKFCYGVKFEMTASNVVHLRCAAEYLEMTEEIAEGNLIAQTENFLTPTVLRSWKDSIKALHTCDDIIDLAEKLQIVKRCIDSVATRSCTDPDLFGWPVVQYGGPMQSPGGSVLWNGISTGARPRHSSPDWWYDDVSCLSLPLYKKVISAMEYRGINQDIIVGSLNHYAKRRLPGLNRRKSISDVSSCLSISSLTSIPSEEEQKYLLEEIDRLLPFQRGVTSCKLLFGLLRTAIILKASPSCVSNLERRIGMQLDKATLEDLLIPNISESVETLYDVDCVHKILDHFLAMDQETGGASPGLGEDAQMLASPSLMPITMVAKLIDGYLAEVAPDVNLKLPKFRSLAAAIPDYARPIDDGLYRAIDIYLKAHPHLSESEKEELCRVMDCQKLSLEACTHAAQNERLPLRVIVQVLFFEQLQLRSSIAECLMVSENLEGGSRQLIPTISGEQYRPGWPLASRENQALREGMDNMKQRVADLEKECSTMRDEIERLGRSRSTGKGRFSLNMKPQICSTKEAIPTTATTTATASEEKMAVVKGDTTPRLKLSRHKKKLSIEA

SEQ ID NO: 53855 - protein, 146 aa, Oryza sativa
MYHHQGWSSSSSSSSSLRRVLSTGGGLVEEERRERIDKYRSKRNQRNFDKKITYACRKTLADSRPRVKGRFARNSSDDAAAAAAAQVEVSPATNNNVPEWWPAVQEALARQEQEAAGLHLCDTADDDLLGAYLGVSSIDLYSPRGH

SEQ ID NO: 53856 - protein, 393 aa, Oryza sativa
MARHPVLMLLVVVVMSWHWGGAAAQVFRPPWNGTFPMGPGGGGGGSVGGGGGAAAAASVPAMFVFGDSLTDNGNNNDMTSLAKANYLPYGIDFAGGPTGRFSNGYTMVDEIAELLGLPLLPSHNDATGDAALHGVNYASAAAGILDNTGQNFVGRSPFNQQIKNFEATLQQISGKLGGGAAGKLAPSLARSIFYVGMGSNDYLNNYLMPNYNTRNEYNGDQYSTLLVQQYTKQLTRLYNLGARRFVIAGVGSMACIPNMRARNPANMCSPDVDDLIIPFNSKVKSMVNTLNVNLPRAKFIFVDTYAMISEVLRNPWSYGFSVVDRGCCGIGRNRGMITCLPFQRPCLNRNTYIFWDAFHPTERVNILLGKAAYSGGADLVHPMNIQQLAAWQP

SEQ ID NO: 53857 - protein, 268 aa, Oryza sativa
MAFSISKKAAVAALFSFLVVTCVAGARPGNFSASDFTADPNWEVARATWYGAPTGAGPDDDGGACGFKNTNQYPFSSMTSCGNEPIFKDGKGCGSCYQIRCVNHPACSGNPETVIITDMNYYPVSKYHFDLSGTAFGAMAKPGQNDQLRHAGIIDIQFKRVPCNFPGLKVTFHVEEGSNPVYFAVLVEYEDGDGDVVQVDLMEANSQSWTPMRESWGSIWRLDSNHRLTAPFSLRITNESGKQLVASQVIPANWAPMAVYRSFVQYSS

SEQ ID NO: 53858 - protein, 136 aa, Oryza sativa; identical to SEQ ID NO: 33429

SEQ ID NO: 53859 - protein, 1044 aa, Oryza sativa
MTPDETALITLKKGTKLIKYSRRGKPKIRAFRLSSDETSLIWFSHKKEKFLRLSSVTKIIPGQRTAVFGRFLHPEKDYLSFSLIFKNGQRSLDLVCKDQAEVEVWFSALEGLISSFRKKSLINEHKDRVSFSEEVTYYQDRHSYDSTLDIASNISRSFNSAGYCGTNSFSFRKSDVGFDRLNMIRTSAADSSRVSISSALSSYSQGSGTDDIESLGDVYVWGEVWTDVTPSDGHTSSSCSKVDVLIPKPLESDVVLDVNQIACGTRHVALTTRQGEVFTWGEEFGGRLGHGTDADISRPKLVESLSLTVVDLISCGEFHTCAVTTSGDLFNWGDGSYNVGLLGCGTEVSYWLPKKVSGPLEGLQVLSVACGSWHSALTTSSGKLYTFGDGTFGVLGHGDRETLAYPKEVEALSGFKTIKVACGIWHSAAIVEVTNQTGANVMSKKLYTWGDGDKNRLGHGDKEPRLVPKCVQALLEYNFHQLACGHNMTVALATSGRVFTMGSSSNGQLGNPKSDGKQPCLVQDRLASELVEEISCGASHVTVLTSRSEVYTWGMGANGRLGHGDLKDRKKPCLVEALKDRHVKSISCGSNFTTCICIHKWVSGADQSVCTGCRQAFGFTRKRHDCYNCGLVHCHACSSRKVLKAALAPTPGKPHRVCDSCFLKLKAAETGSNNSNRRNAVTRRSIDGREKLERPEIRPSRTTAPAESVKYTEVKAARNDMRASQISSLLQFKDLSFSALQPTAMSPAVTMSPAVPALSTPSPYTKKTKSPAPAIPQFPKTDIDNLQKSNELLNQEMLKLQSQVDSLKQKCEAQHEQLQISDKKTKTVVSMATEEYTRCSAVVEFVKFLDNELNGIVHELPSDAAESLKALQNQVQALLREQRSHPSELLNPMDHDGIQLSSGGNALHDFSNHRSGSTRYLFMSQDASSASGSAISLTSEPPSHRGMEHHAKVPNDFVPKHDTHGEVQLIEQFEPGVYVTLIQLKDGSKVFKRVRFSKKKFAENQAEEWWRENQERVFKKYSHPTVPQTTSTKTGSSNEEEHHS

SEQ ID NO: 53860 - protein, 84 aa, Oryza sativa
MKIIFSMLPATAVDPVTPSSILVAIAASYCFLFPTASSLLTPILWHIMVGKVCGRYTLFHPFGLVFFFHGVVELLSGHINRIDR

SEQ ID NO: 53861 - protein, 493 aa, Oryza sativa
MADNGGHEDAPPNGDHHPPAIVANGDDQEPAANGDDQAEAAANGGDQAAAANDQAAAENDQAAAENDQAAAENDQAAAANGGEHEEANRDLPNVAGIRAPRELRRVEVDALHQVLLRMPAAEVARCSGVCGRLRDLIATDSFRRGHQRHRSRHPMPLFFYRLDHWAFPDRVRVHLRAVDVAARETHPVICFSHADADLRSADPRVFTIEGSCDGILLLSYHTRLYACNPSTRRWRRLPPLHDDHVIVGFYGHGAIDEREYRVLYHTARPGCRYWVFSLSFFPDQPPRDIGRPADLEAVRAVLAEGISPSYEMPPVAIAHRLHWRAQAASLNVLVFDTVAESFGWIPPPNQQEGNQMIPVEGDQLLEINGRLAMTLVSQTTVDVWVLQEGEAWEHHYQISLPVDLLNVFGGYDDEGFVSAAVFAVSQERNVLAQCPAMMLQCDTEGNVLMFYSLAGHLTVLSRYMLQESLLAHAFLPMRQEDAIDGDPPFFQGP

SEQ ID NO: 53862 - protein, 504 aa, Oryza sativa
MESLLAAGAGGIGVAAAAVGGFIAAATLAVAPPKNRRNPPPAVPGLPIIGNLHQLKEKKPHQTFTKWAEIYGPIYTIRTGASSVVVLNSTEVAKEAMVAKFSSISTRKLSKALTVLSHDKSMVATSDSGDFHKMGKRYIMLSMLGTSAQKQFRDTRDMIINNMLSTFHQLVKDDPHAPLIFRDVFKDELFRLSMIQSLGEDVSSVYVDEFGRDISKEEIYNATVTDMMMCAIEVDWRDFFPYLSWVPNKSFETRVFTTESRRTAVMRALIKQQKERIVRGEARTCYLDFLLAENTLTDEQLMMLVWEALIEAADTTLVTTEWAMYELAKNPDKQERLYQEIREVCGDEAVTEEHLPWLPYLNAVFQETLRRHSPVPLIPPRFVNEDTMLAGYDVPAGTEMVINLYGCNMNKKEWESPEEWAPERFAGGRFKVADMYKTMAFGAGRRVCAGSLQATHIACAAIARFVQEFGWRLREGDEEKVDTVQLTAYKLHPLHVHLTPRGRM

SEQ ID NO: 53863 - protein, 478 aa, Oryza sativa
MMPHSGVVDAAAKGVKLGGGGGGALMVRRVASGKLLSASSHLLFRATILATLCLVCLFTVHYPSLLSHSFHLSSAAAAANGKHRAASRSSHRSLLGSSAAVAYGGAAWEKEVRRSAAPRRDGGLSVLVTGAAGFVGAHCSLALRARGDGVVGLDNFNSYYDPSLKRARQRLLASRGVAVLDADINDAALLERLFDAARFTHVLHLAAQAGVRYAMRAPRTYVASNVAGLVSVFEVAAKHADPQPAIVWASSSSVYGLNTDAPFSEEHRTDRPASLYAATKKAGEAIAHAYNHIYGLSITGLRFFTVYGPWGRPDMAYFSFARSIVAGEPITLFRTADGADARRDFTYIDDVVKGCLGALDTAGESTGTKSGKKRGPAPLRVYNLGNTSPVPVTRMVAILEKLLGRKANKRVVTMPSNGDVPFTHANVSHAARDFGYRPATPLDAGLRRFVDWFVHYYKLDTAKIAKGKRKSMAMSAAS

SEQ ID NO: 53864 - protein, 425 aa, Oryza sativa
MKRKYYSFEECMSLREVKSLRRMNHPNIVKLKEVIRENDILYFIMEYMECNLYQLMKDRVKPFSEAEVRNWCFQIFQALAYMHQRGYFHRDLKPENLLVSKDVIKLADFGLAREVTSVPPYTEYVSTRWYRAPEVLLQSSIYDSAVDMWAMGAIMAELLTLHPLFPGTSEADEILKICNVIGSPDEQSWPQGLSLAETMKFQFPQVSGNQLAEVMTSVSSEAVDLISSLCSWDPCKRPKAAEVLQHTFFQGCTFVPPTVRSKAGVLPKTPPCVGVKGVSEHGMPRRYSTGTLSTTKPHSNASLKSSGLSKTGVQRKLQMDRQAPQKIKKPTESNNKLTTNRVPARNSPGHPVLRHSRSLPETGRATMHKVSTLTERLTHMSVTSRTRTTPKPAAPLLKAGLGKSDLLGKTDEIPPAKRLTRKLVS

SEQ ID NO: 53865 - protein, 691 aa, Oryza sativa
MVNSDLHVLVEAKKKRASSSERSGDKKCSASKEITGMLKKYEPKESKRLVISSGVATTAAVAEQEVHSRFVKGSVYEGLDGNQNVGLQTGVRSNGVVKRDDAKRSSGDVQSDAAPEKMNEGLDLQKQSNQTSNLLVVGGVPDLQTNQSESLTIKKEASTDDHERTEAIQFVSDEHKSGKQDTAMLSTLQRHSSKLASDLVYQHPKSETQNPMHTIPEHPNSSLEPSSEETTVRLVKKDQTRLVSSADSENDFAKKSESSQDRTRSSDKVQLKGFVPSAPKSSQGSRTYVSSAKNRFIVPKEQLQKTSTEGNAPPGSLQGEVAPLHSRNKAMPLSFYQRKDKIHHRSIHITQDTSNSSASAELQSTETTASLSDEQLALLLHQQLNSSPRVPRVPRCHQASTMQMLHPTGASVFSKRSSAHGGRDQALVLKKRNKDDAWRDNDETKKTGKVSSVERRHRDSSTERVLAAKDSCKFTENIESEQRNRGICSTGATSGVGNDAPIDRGVSHDLPGLIEEIISKNTNITYGELCNAIRQHWGDLSKPNVENNAYPNYLHAVNDCLRNRNDWAHLVDQAAMMNPNKRRKVEESDSLSADVLATEKTNKEAKRGPEDTNAESHHEILPRGKRKARKCRRLELKGRRVNDTRKRSSFDSASDDDDTTLSDSSSDRNDTPMDKSLEDSFVIAKNADSSS

SEQ ID NO: 53866 - protein, 564 aa, Oryza sativa
MEPTFCEMYANFCFHLAGALPDFSEDNEKITFKRLLLNKCQEEFERGEREEAEADKTEEEGEIKQTKEEREEKRIRARRRMLGNIRLIGELYKKRMLTERIMHECIKKLLGNYQNPDEENIEALCKLMSTIGEMIDHAKAKEHMDAYFDIMLKLSTSQQLSSRVRFMLRDSIDLRKNKWQQRRKVEGPKKIDEVHRDAAQERHAQSSRLARGSVVGSGPRRGAAPMDYGPRGSAAALASPSSQQVGHRGMPSHSRGFGTQDIRFEERSPLDHRTTVLPPRKDEAITLGPQGGLARGMSIRGQPLISNAELSSADSRRMVSGPNGYNSASTAREEPGSRIPDRSGRIAPNTQFAGPSNRPASQEGRSGNKLYSEDDLREKSISAIREYYSAKDEKEVALCIEELNAPSFYPSVVSLWVNDSFERKDMERELLTKLFVSLCNSRNNLLSKSHLTAGLATVLGSLEDALSDAPRAAEYLGRLLARFVVESILSLQEVGTLIEKGGEEPGELVHHGIGADVLGAVLESIKVEKGDSFLNEAKASSNLKLEDFRPQHLKRSKLDAFMKA

SEQ ID NO: 53867 - protein, 562 aa, Oryza sativa
MTTPSAPPPCPHLAAYRHTTRSLRFLRRCLRVRPLGRPEIRREPRELPRCSPCSSPTSSSSRLYACLSCAAVFCPTHAASHASASTSGGHQIAVDVDRAELFCGACGDQVYDPDFDHAVVLAQSSSLPPPSASASPSPSPAAPRKRRRVEYRAWAPDPAEFALISSADPTTSASAAAPAGLRGLNNLGNTCFMNSVLQALLHAPPLRNYFLGDRHNRYLCPRQTPMRRRSAEANDKAACLACDLDEIYSAAFSGERTPYSPAKFLYSWWQHASNLASYEQQDAHEFFISILDHIHENIKDDQHKSLAQGHGDCCIAHRVFSGILRSDVTCTHCGFTSTTFEPCMDISLDLDAGYNNSLGVANPKVHVRNGERSSGGTNTKVSTLMRCLERFTRAERLDAEQKFFCERCKERQESLKQMSIRRLPLVSCFHIKRFEHSSVKKMSRKVDHCLQFPFSLDMAPYLSSSILRSRFGNRIFPSEASDADSVSEFSSEFEIFAVIMHSGKLEAGHYVTYLRLNNHWYKCDDAWVTRVEEHTVRTSQAYMLFYVQKTLYYKACERATAV

SEQ ID NO: 53868 - protein, 391 aa, Oryza sativa
MARQQVAAAAAVAAIAGAAAVLASELYSRRCRRLATRVRELEASLAAATEKAAAERRGRVRAQQSLRKALSEQELSSDEKKKLSQSPKSFPMASIGVVQSCFSTRNGTPRQPLVVPLARATVMLDPARVPAEALEGLADYSHCWILYVFHLNTDLDKMWNDPARSKLKAKVRVPRLKGGKMGVLATRSPHRPNPIGLSVAKVEAVDGHSILLSGVDLVDGTPVLDIKPYLPYSDGVKGAAIPNWLEVDGALAVESIHFSEHFISSLSDCWMHVKKQSLYASADEFQDLVKEVLSWDIRSLSQRIRPHDVTIKDVTDNGGSKIDNGCSNDEDRQSVDPSTSVVYHLHLEGIDVSYRIDQDSNIVVENAALLSSAVNQHRYSYLTWREKVSIL

SEQ ID NO: 53869 - protein, 349 aa, Oryza sativa
MRLHGEVSFDEDEEEVVMVPAAALSSSPLNGGAVPVTRLVVGYALTKKKVKSFLQPNLLLLARKKGINLVAIDDTRPLAEQGPFDVILHKITSKEWQQVLEDYHEEHPEVTVLDPPNAINHLNNRQSMLAEVSDLNLSSFYGEVCTPRQLVIMRDPSSIPTAVAMAGLTLPLVAKPLVVDGTSKSHELSLAYDEASLSMLDPPLVLQEFVNHGGILFKVYIIGETIQVVRRFSLPDVNTYDLLNNVGVYRFPRVSCAAASADHADLDPHISELPPRPLLEKLGKELRGRLGLRLFNIDMIRELGTKDRYYIIDINYFPGFGKMPGYEHIFTDFLLNLAQSKYKKCLSGG

SEQ ID NO: 53870 - protein, 516 aa, Oryza sativa
MASLMEVQVPLLGMGTTMGALALALVVVVVVHVAVNAFGRRRLPPSPASLPVIGHLHLLRPPVHRTFHELAARLGPLMHVRLGSTHCVVASSAEVAAELIRSHEAKISERPLTAVARQFAYESAGFAFAPYSPHWRFMKRLCMSELLGPRTVEQLRPVRRAGLVSLLRHVLSQPEAEAVDLTRELIRMSNTSIIRMAASTVPSSVTEEAQELVKVVAELVGAFNADDYIALCRGWDLQGLGRRAADVHKRFDALLEEMIRHKEEARMRKKTDTDVGSKDLLDILLDKAEDGAAEVKLTRDNIKAFIIDVVTAGSDTSAAMVEWMVAELMNHPEALRKVREEIEAVVGRDRIAGEGDLPRLPYLQAAYKETLRLRPAAPIAHRQSTEEIQIRGFRVPAQTAVFINVWAIGRDPAYWEEPLEFRPERFLAGGGGEGVEPRGQHFQFMPFGSGRRGCPGMGLALQSVPAVVAALLQCFDWQCMDNKLIDMEEADGLVCARKHRLLLHAHPRLHPFPPLL

SEQ ID NO: 53871 - protein, 301 aa, Oryza sativa
MAANKLKFSPLLALFLLAGIAVTSRAGDIAVYWGQNGDEGSLADACNSGLYAYVMVAFLSTFGNGQTPVLNLAGHCEPSSGGCTGQSSDIQTCQSLGVKVILSIGGGAGSYGLSSTQDAQDVADYLWNNFLGGSSGSRPLGDAVLDGVDFDIETGNPAHYDELATFLSRYSAQGGGKKVILTAAPQCPYPDASLGPALQTGLFDSVWVQFYNNPPCQYANGDASNLVSAWNTWTGGVSAGSFYVGVPAAEAAAGSGYVAPGDLTSAVLPAVQGNAKYGGIMVWNRFYDVQNNFSNQVKSSV

SEQ ID NO: 53872 - protein, 872 aa, Oryza sativa
MTMEHGEDCCVKVAVHVRPLIGDEKLQGCKDCVSVVSGKPQVQIGSHSFTFDHVYGSSGTPSAAMFEECVAPLVDGLFQGYNATVLAYGQTGSGKTYTMGTACKEGSHIGIIPRAMATLFDKIDKLKNQVEFQLRVSFIEILKEEVRDLLDPATAAVGKLENGNGHATKLSVPDKPPVQIREASNGVITLAGSTEVHVTTQKEMTACLEQGSLSRATGSTNMNSQSSRSHAIFTITLEQMRKADPIMTLDGMPIEEMNEDYLCAKLHLVDLAGSERAKRTGSDGLRFKEGVHINRGLLALGNVISALGDEKKRKEGAHVPYRDSKLTRLLQDSLGGNSKTVMIACISPADINAEETLNTLKYADRARNIQNKPIVNRNPVADEMKRMRQQIEYLQAELVSARGGVVLDDVQGLRERISMLEQKNEDLCRELYDLRNHGYTDPCEPELQKIGTGYTKGEGLKRSLQSTEPFDVPMTDSVRAGSPKDIDDEVAKEWEHTMLQDSMGKELNELNRQLEQKESEMKMYGSDTVALKQHFGKKLLELEEEKRAVQQERDRLLAEVESLNADGQTHKLRDAQLQKLKTLEAQILDLKKKQENQVQLLKEKQKSDEAAKKLQEEIHSIKAQKVQLQHKIKQEAEQFRQWKATREKELLQLRKEGRRNEYERHKLQALNQRQKLVLQRKTEEAAMATKRLKELLEARKSSGRDNSGMNGTSPGSHMTEKSLQKWLEQDLEVMVHVHEVRNEYEKQSQLRAALGEELAILKQEDVMSGAASPPRGKNGNSRANTLSPNARQARIASLESMVTISSNTLVAMASQLSEAEERERAFSGRGRWNQLRSMAEAKSLLQYIFNVAADARCQVREKEMEIKEMRSK

SEQ ID NO: 53873 - protein, 760 aa, Oryza sativa
MSARRGWRAPARWSSTRPTPSGTSRSASTAPTRRRPVAFTVKSQHLVGAGVLGAARVPAARVATGEPVEGWLDLRGGEHGHATHTQKLRVRLRFLGVESDPWWDAGVRLPGFAGVTPAFFPERSGCRVTLYQNSHLSGGFDPGVRLAGGGAYRPARLWEDMYVAIRDARRFVYVAGWSVNADITLVRDASRMVPGAEGVTLGELLRRKADEGVAVLVMPWQDKTSVSFLGNGGLMRTHDEETRRFFEGTNVRCFLCPRNADASLTMVQSIEVAAEFTHHQKTVTLDAAAASPGDADGSRRHIVSFIGGIDLCDGRYDDENHTLFRDLDTTYRHDFMQNNFKHAGLRRGGPREPWHDVHCRLEGRAAWDVLANFEQRWRKQAPPEMAGCLLDLSQAELPDPGSFGDDEPWNVQVFRSIDDASVVGFPAEPVAAAAMGLTNGKDVTIDRSIQAGYVEAIRRARRFIYVENQYFLGGCASWAEDRDAGCLNLVPVEIALKVAAKIRRGERFAAYVVTPMWPEGEPAGDSVQAILRWNRLTVEMMYGIVTKAIDDAGLRGQAHPCDYLNFFCLGNREAPRPGEYSPPETPDVDTDYWRAQVNRRFPIYVHAKLMIVDDEYVMVGSANLNERSLAGNRDSEIAQGSYQPAHLNGGPSGRARGLVHAFRMSLWHEHLMGHAGGGGGVFLEPESAECVRAVRRAAEATWDAYTRDTMEDLLGHLLPFPITVSEFGEVADLTADGCFPDTTAPVKGRRSLKLPAILTT

SEQ ID NO: 53874 - protein, 753 aa, Oryza sativa
MELTVLKEENMLLKADAQFLKAKIVEFAETEEFLFKLEKERSLLDATVRELEARFLVAQTDIWKDVPLQYDVWMEKVENLQHMLGCLKNHVEKYAALLDQHDDLHDKIDELEASLKEGKTSEFSPYVVELLQQKLKAAKSHHQAGHQETNTHIQVYQQLTEEFQDNLGKLIEESGRLEHSANSMPSEFWSHILLMIDGWFLERKIPNTGARMLREMAWKRDDRICEAYFACKGAKESDVMETFLKLSLSGNSQCSSGLHIVHIAAEMAPVAKVGGLADVVAGLGKALQTKGHLVEIVLPKYDCMQLDQITNLKVLDVVIQSYFDGNLFSNNVWTGTVEGLPVYFIEPQHPSKFFWRAQYYGEHDDFKRYSYFSRAALELLYQSGKKIDIIHCHDWQTAFVAPLYWDIYATRGFSSARICFTCHNFEYQGTAPAPDLSYCGLDVEQLDRPDRMQDNAHGRINVAKGGIAYSNIVTTVSPTYALEVRSEGGRGLQDTLKMHSRKFVGILNGIDTGTWNPSTDRFLAVQYSATDLQGKAANKAFLRKQLGLYSEDASQPLVACITRLVPQKGLHLIRHAIYKTAELGGQFVLLGSSPVPHIQREFEGVADQFQKNNNIRLILKYDEALSHGIYAASDMFIIPSMFEPCGLTQMIAMRYGSVPIVRQTGGLCDSVFDFDDETIPVELRNGFTFARTDEQDLSSCLERAFSYYSRKPMVWRQLVQKDMQIDFSWDSPASQYENLYQSAVAQARGAAQT

SEQ ID NO: 53875 - protein, 533 aa, Oryza sativa
MIPVVVVLHRCAVSSSWPDRVFEAKHIAGAGEQDMQDDLPDDLTASQYIGYDKFLGGLLQEGFDEVSCRSRYQFARYHKNFTRIPSSYLLERLRRQEALQKKCGPGTKSYKQAVKLLRSSQGVNMTTDCNYLFLTVHAGLGNRMLEIASAFLYALLTNRILLLDRYQEIGDLFCEPFPGTSWLMPSDFPLNYGEFTQSSPESYGNMLQNKVVGDNTDQSLAGSRPPYVFLYLDGNYEFHDKLFFCEDDQQFLQDVPWLIMRTDMYFIPSLFLIPSYQDELSRLFPEKDAVFHHLARHLFHPTNSIWYSVKGYYRSYLAKANKTVGIQIRIFEKEGILQKNGRFPYVLEQILSCAQNEKLLPEISMKDEAEAPTAPKNNQTIAVLTTSLSSWYSDQIQKKYSEHPTVDGTRVEVYQPSHEEYQRSKNKKHNMKALAEIYLLSMTDVLITSGFSTFGYAAQGLSGLTPWIMFRSENHAMPDPPCHRAMSIEPCFHQAPFYDCKAKRNADLGKMVPFVRHCEDVSWGLKVVNQTQW

SEQ ID NO: 53876 - protein, 377 aa, Oryza sativa
MEDLPMGRRNPAASLTDDLVVEILRRLPVRSVCRFKRVCRSWRNLIADREHRKKLPQTLSGFFYKSSSGERCPCSAHHFTNVSGKGVPLIYPSFSFLPQCDTVVPLDCCNGLLLCRCFQPGPNNSDDEIEPFHYAVCNPATKEWVMLPDADWANGETRIACLCFDPAISSHFHVLEYVEAEYEDVTGVEIYSSETGLWTLHVSGWGDDVFLRHWANPRSVFLNGFLHSATCAAEIAVVDMEGKKWRTIAMPEPEGDTGIIHQTQGRLCAFNVDPDDIFKLSIWILEDYDTDNWILKHTVSSLRLFGGMKYRFGFDYQIIAVHPECNLIFFVYGWDKTLMAYEMDRKEVRAIRNLGHDSFEPYLPYVPLFNESLADGC

SEQ ID NO: 53877 - protein, 884 aa, Oryza sativa
MGAIGGDELVQWDKMGAAEAVNGGCGGAGKMDRIQVLVRLRPLSEKEVARREPAEWECINDSTVMFRSTFPDRPTAPTAYTFDRVFHSDCSTKEVYEEGVKEVALSVVSGINSSIFAYGQTSSGKTYTMTGVTEYTVADIYDYINKHEERAFVLKFSAIEIYNEVIRDLLSAENTPLRLWDDAEKGTYVENLTEVVLRDWNHLKGLISVCEAQRRTGETFLNEKSSRSHQILRLTVESSAREFLGKDKSTTLVASANFVDLAGSERASQALSAGTRLKEGCHINRSLLALGTVIRKLSMGSNAHIPYRDSKLTRILQPSLGGNARTAIICTLSPATSHIEQSRNTLLFGSCAKEVVTNAQVNVVMSDKALVKHLQKELARLESELRHPVQSSSLETLLKEKDNQIRKMEKEIKELKSQRDLAQSRLQDLLQSVGDHDLNRQVQGKHSVRSPPSVGMPPSVSRDDSSQVSHDDSDLYKEVRCIESNRTGGNDQLDLSAGESSSPQDSNMNSGLHGNDSNASVNSRHSRPSGEAPITLEEHLENIRRPFVSLAKDLGSSTRNSSNLRVIGRSRSCRSLTGSTMFDDMEMDDCTPLNRSLVEFPGRPVESHRRGSALHYDAETDTLSRAGSMSSEISTFKDAKTNGSVACDTEFTGIGEFVAELKEMAQVHYQKQLGDQNANGKSIGLDPIEGVSQSPSRWPLEFEKKQQEIIELWQACSISLVHRTYFFLLFKGEAADSIYMEVELRRLSFLRDTYSRGSTPSNAIVGSLSTSPVASAKKLQREREMLARQMQKRLSTEEREHTYTKWGVSLDSKRRKLQVARRLWTETKDLEHVRESASLVAKLIGLQEPGQVLKEMFGLSFAPQQQPTRRRSSNGWRYGIPSFA

SEQ ID NO: 53878 - protein, 111 aa, Oryza sativa
MKRHEFVHTCVLAYREKQGAGAAARGVDGDGALLSGGGGGGLAKRQEGGQRRCRKRGMRREYVHTCERSPAGGNRTPAPLPVGRGSRGWGGGEERCRGARRSRMGRCCRHA

SEQ ID NO: 53879 - protein, 527 aa, Oryza sativa
MAPVKAEELVAFVPKEQYDGVDYCITSPPPWLTAVLLAFQHYLVMLGTTVIVATILVPLMGGGHVEKAIVVQTILFLAGINTLLQVHLGTRLPAVMGASYAYIYPAVAIILSPRFAIVVDPFERFVYTMRSLQGALIIAGVVQAIIGFFGIWRIFIRFLSPLAAVPFVTLSALGLFYFAFPGVAKCIEVGLPALILLLLFTEYAAHFFARGSFLFGRCAVLATVLVVWIYAEILTAAGAYNERSLVTQFSCRADRSGLIHGAPWVRFPYPFQWGYPIFFADDCFVMIAASFVSLIESTGTLMAVTRYAGATFCPPSVFARGVGWQGISTILDGMCGTLTGSVASVENAGLLALTRVGSRRVIKISALFMIFFSLFGKFGAIIASIPLPIFSALYCVLFAYSAAAGLCFLQYCNLNTLRTKFILSISLFLGLSIPQYFREYEVFYVFGPVHTHSPAFNVIVNVIFSSPATVAAILAYLLDCTHTYWDGPVWKDRGFHWWEKFKSYRHDPRSEEFYSLPYGLSKYFPSF

SEQ ID NO: 53880 - protein, 168 aa, Oryza sativa
MEQLNAKLYDKYTALKKRKLLDEGLDQKRAADIKELQQAMKDWVADLQGENERLIAKLTQKEQQLVEVQTLLLDETRKTKELNSEILKLQCLLAEKNDANHIATGSPDTTAEMIIENQTPIPPAKKTPKSKSRERNIHFIEKATVPCNGFQEEGRDLDSCRRHMSISG

SEQ ID NO: 53881 - protein, 314 aa, Oryza sativa
MTWCNSFSDVRTAVDSSLSPAAAVAAAAGKKAAASLAVLVKMCPSCGHRARYEQETTTIQDLPGLPAGVKFDPTDQELLEHLEGKARPDSRKLHPLVDEFIPTIEGENGICYTHPERLPGVSKDGLVRHFFHRPSKAYTTGTRKRRKVHSDEVDGGETRWHKTGKTRPVMANGRPRGYKKILVLYTNYGKQRKPEKTNWVMHQYHLGSDEEERDGELVVSKVFFQTQPRQCGSTAAAAAAKEASAAVAAAVVNSNYSIVHGHQGGGGGSFLKEANVVHEFYDPAATMGYRPPAPAAHFAPNFAVHAARNSFGGP

SEQ ID NO: 53882 - protein, 480 aa, Oryza sativa
MGQEGMGYNNGKGGGGGGGGLPMTAPRPRGASPLSSHGHHHRSRKIHRTFNNVKITVLCGLVTILVLRGTIGLNLSLPNQPTDADALAGAKAVEDIDRILREIRSDGGADDDAAAAGDLAGSFNATALNATEAAAAYASAVERYALGPKISDWDGQRRRWLRQNPGFPSTVAGGKPRILLVTGSQPGPCDNPLGDHYLLKTTKNKIDYCRLHGIEIVHNLAHLDTELAGYWAKLPLLRRLMLSHPEVEWIWWMDSDALFTDMAFELPLSRYQDRNLIIHGYQDLLFEKHSWIALNTGSFLFRNCQWSLDLLDAWAPMGPKGFIRDEAGKILTANLKGRPAFEADDQSALIYLLLSQKEKWMNKVFIENSYYLHGFWAGLVDKYEEMMENHHPGLGDERWPFVTHFVGCKPCGSYGDYPVERCLRSMERAFNFADNQVLRLYGFAHKGLESPKIKRVRNQTTKPIDDKENLDVKAKISTTS

SEQ ID NO: 53883 - protein, 487 aa, Oryza sativa
MPEDVEMNDSQPQPAAAPPPAASTLQHLKEIASVIEAGSLTKEVRRISRAVRLTVALRRRLAARDVAAFLAFALPHSSEAFARLSSLLPKEDGSEMDVDLAAPAAQVSIKHGLPEIEIYCYLLVLIFLIDNKKYDEAKACASASITRLKNLNRRTVDVLASRVFTYYSYVHELTSSLAEIRGTLLALHRMATLHRDELGQETLLNLLLRNYLHYNLYDQAEKLRSKAPRFEAHSNQQFCRYLFYLGKIRTIQLEYTDAKESLLQAARKAPTTARGFRVQCNKWAIIVRLLLGEIPERTVFMQKGMKAALAPYFELTNAVRVGDLELFRAVAEKFASTFSADRTRNLIVRLRHNVIRTGLRNISISYSRISLADIAKKLRLDSENPVADAESIVAKAIRDGAIDATIDHANGWMVSKETGDVYSTNEPQIAFNSRIAFCLNMHNEAVKALRFPPNSHKEKESAEKRRERLQQEEELAKHMAEEDDDDF

SEQ ID NO: 53884 - protein, 284 aa, Oryza sativa
MAISGEDRYAAAGGGGDSGGGKLWNLCRMPFWQPGGAPATASAPPPPSSSSSSAGIHHHSAGRYGHEGGGGGAVAGDGAPAGSISSVAKSLLPARRRLRLDPPNKLYFPYQPGQQVRSAIRIKNTSKSHVAFKFQTTAPKSCFMRPPGAILAPGETIIATVFKFVEHPENNENVLQKCKVKFKILSLKVKGPMDYAPEMFDEQRDQAVVEKILRVVFLNVENPGPQLEKLNNQLAEAEAALEARKKPPEENGPKIVGEGLVIDEWKERRERYLAQQQVEVVDSV

SEQ ID NO: 53885 - protein, 519 aa, Oryza sativa
MELQSSWATFFAVVLATVVFLLRAVLLRRRRAYKLPPGPKPWPIIGNLNLISSLPHRSIHEISKRHGPIVQLWFGSCPVVVGSSVEMAKLFLQTNDAVFADRPRTAAGKYTAYDCTDITWSPYGAYWRQARKMCAAELFSARRLESLEHIRHEEVRALLRELHGSGAAGNAVQLRDHLSMAALGVISRMVLGKKYVEKQPAGGGAAMTTPEEFKWMLEELFLMNGVLNIGDFIPWLDWLDLQGYIRRMKNVNRLIHRFLDRVLDEHDERRRLQGDGFVARDMVDILLQLADDPNLDVQLTRNGIKGITQDLVTGGADTSTVTVEWAMSEVLKNPAILAKATEELDTIVGVGRLVTEGDIPHLPYIHAIMKETMRMHPVVPLLVPRMSREDASVAGYDVPAGTRVLVNTWTIGRDPSVWDSPEQFRPERFVGSGIDVKGRDFELLPFSSGRRMCPGYNLGLKVIQLTLANLLHAFSWCLPDGVTAGELSMEEIFGLTMPRKIPLLAVVKPRLPDHLYAEP

SEQ ID NO: 53886 - protein, 687 aa, Oryza sativa
MFSMVLPMISPFGDWLFYKVCNNMTIGMLLRWLLCSPVQFIIGWRFYVGAYHALKRGYSNMDVLVALGTNAAYFYSVYIVLKALTSESFEGQDFFETSAMLISFILLGKYLEVVAKGKTSDALSKLTELAPETACLLTLDKDGNAISETEISTQLLQRNDVIKIVPGEKVPVDGVVIKGQSHVNESMITGEARPIAKKPGDKVIGGTVNDNGCIIVKVTHVGSETALSQIVQLVEAAQLARAPVQKLADRISRFFVPTVVVAAFLTWLGWFVAGQFDIYPREWIPKAMDSFELALQFGISVLVVACPCALGLATPTAVMVATGKGASQGVLIKGGNALEKAHKVKAIIFDKTGTLTVGKPSVVQTKVFSKIPLLELCDLAAGAEANSEHPLSKAIVEYTKKLREQYGSHSDHIMESKDFEVHPGAGVSANVEGKLVLVGNKRLMQEFEVPISSEVEGHMSETEELARTCVLVAIDRTICGALSVSDPLKPEAGRAISYLSSMGISSIMVTGDNWATAKSIAKEVGIGTVFAEIDPVGKAEKIKDLQMKGLTVAMVGDGINDSPALAAADVGLAIGAGTDVAIEAADIVLMRSSLEDVITAIDLSRKTLSRIRLNYVWALGYNVLGMPVAAGVLFPFTGIRLPPWLAGACMAASSVSVVCSSLLLQLYKKPLHVEEVAAGPKNDPDLV

SEQ ID NO: 53887 - protein, 393 aa, Oryza sativa
MGSQEYIKQGGQQLVAAILGIGTAVPPYVLPQSSFPDYYFDISNSNHLLDLKAKFADICEKTMIDKRHVHMSDEFLRSNPSVAAYNSPSINVRQNLTDVTVPQLGAAAARLAIADWGRPACEITHLVMCTTVSGCMPGADFEVVKLLGLPLTTKRCMMYHIGCHGGGTALRLAKDLAENNPGGRVLVVCSEVVSMVFRGPCESHMGNLVGQALFGDAAGAVVVGADPVEANSERTLFEMVSAWQDIIPETEEMVVAKLREEGLVYNLHRDVAARVAASMESLVKKAMVEKDWNEEVFWLVHPGGRDILDRVVLTLGLRDDKVAVCREVMRQHGNTLSSCVIMAMEEMRRRSAERGLSTAGEGLEWGLLFGFGPGLTVETILLRAPPCNQAQAV

SEQ ID NO: 53888 - protein, 428 aa, Oryza sativa
MGKQEQEKMLLQAAYDDNLRLLRKMARGLDTGQGEAAVVAAVAGRADGNRALHLAAARGSMDVLRYLVEDLHLSVNQFNAKGETPLCLSSIHGRAAATRYLLDHGSDPTIDKSVLPFHAAATKGHCEIVELFLSRGVDVDLDSITGTPLLTAAMNGQYSTMKILLEHHADPNRVVNHNGTPLIMSIVSGSLECVKLLIKVGADVNFRDPNGVTCVMVAANHGSPVIMKCLLDAGANSNIPDEFNRTPIEVAANRGRRDIVKMLFPLTSPISTLPDWSIDGVISHVQTFGLKPRDNDLSKRKSAELKLQAREAFEREEYMLAGQHYTNAIELTTNAHDKATLLANRSLCWLRLSTGNGALADANMCRMLRPSWPKACYRQGAAFMFLKDYGKACEAFADGLKLDPANEDIAKALRDAQEAMKDQMEHRG

SEQ ID NO: 53889 - protein, 482 aa, Oryza sativa
MMEMVLPVANATAAALARVSAVFNAPLARAVVFGIHIDGHLVVEGLLIAAILFQLSRKSYKPPKKPLTEREVDELCDDWQPEPLCPPIKEGARIDTPTLESAAGPHTTVDGKEVVNFASANYLGLIGNEKIIDSCVGSVEKYGVGSCGPRSFYGTINVHLDCESKIANFLGTQDSILYSYGISTIFSVIPAFCKKGDIIVADEGVHWAVQNGLQLSRSTVVYFKHNDMASLASILEKLTHGNKHTEKIRRYIVVEAIYQNSGQIAPLDEIVRLKEKYRFRVILEESHSFGVLGKSGRGLAEHYGVPVEKIDIITAGMGNALATDGGFCTGSVRVVDHQRLSSSGYVFSASLPPYLASAAMSAVNHLEENPSVLANLRSNIALLHKELSDIPGLEIASNILSPIVFLKLKTPTGSAVADLELLEIIAEKVLMEDSVFIAATKRSSLDKCRLPVGIRLFVSAGHTESDIFKVSASLKRVAASVV

SEQ ID NO: 53890 - protein, 417 aa, Oryza sativa
MAASSGVVVAVVAVVAVMMAVAVAAGEISDDGGDQPSPSPSPSASCARRPVVFAFGDSNTDTGGIAAGMGYYFPLPEGRAFFRRATGRLCDGRLVIDHLCESLNMSYLSPYLEPLGTDFTNGANFAISGAATAPRNAAFSLHIQVQQFIHFKQRSLELASRGEAVPVDADGFRNALYLIDIGQNDLSAAFSAGGLPYDDVVRQRFPAILSEIKDAIQSLYYNGAKNLWIHGTGPLGCLPQKLAVPRADDGDLDPSGCLKTLNAGAYEFNSQLSSICDQLSSQLRGATIVFTDILAIKYDLIANHSSYDANVFFCRVRGAANGVLRPWRAAVQLRLQRELPRGGVPGVRGRQQVRELGRRALHRRRQRRRRRQDPLRRLLEAQAALQLLLQCIARLHQKLHIRMWLLIIHWRIIHEPD

SEQ ID NO: 53891 - protein, 323 aa, Oryza sativa
MMAETMTTKTKPGMAERLLLPLSMVLVQLFTIGALLLAKLSFNSGMAPFVLLAYRNLIGTVTMLPFAFWFERQMMKKVNYKVLGWIFFNALFGIVLAMGLHYYGLRATNAGYTVNFLNLVPVVTFIIAAIFRLEKLKLKTRSGMIKVIGTVICVVGTMVVSLYRGKLLHLWPTHLLKPAQLRAIGGSDDSTFPTHHNMLIGTLFLCGSCLSYAFWFIVQAKVNKEFPSKYFSTMLACLMGTIQAVVIGIAVDRDRSAWALHWDLQLITIIYSGVFNTAATFCLITWAVSRRGPTYPSMFNSLALIITVVLDSMLLGSDISVGR

SEQ ID NO: 53892 - protein, 71 aa, Oryza sativa
MEEVPSPLSYWLCITPETNELCLWLSSSVLQLYSHSLIVHLFLSSCFSVASNNADGYICRRLDASYASSLR

SEQ ID NO: 53893 - protein, 358 aa, Oryza sativa
MAQRTLELTLISAKDLKDVNLLSKMEVYAVVSLSGDRRSRQRIATDRAGGRNPAWNAAPLRFTVPASGAGSLHVLLRAERALGDRDVGEVHIPLSELLSGAPDGAVPAKFVSYQVRKISSGKPQGVLNFSYKIGEVTQSGSYPGASPPVAYGQAPPAPAYPPSAAAAAAYPPQSTYPPPTAYPTAAKADGSAAAAYPPQSAYPPPGKGNEPSTAYPPPAGYPPATGSSKPAKAGEPVTAYPAAAGPSTAAPYGTAPPPQYGYGYPAQPPPPQAGYGYPPPPPQAGYGGGYGYPPQAGYGGYQQQAVKPAKKNNFGMGLGAGLLGGALGGLLIGDAISDASAYDAGYDAGFDDGGGFDF

SEQ ID NO: 53894 - protein, 89 aa, Oryza sativa
MVGGSHQIGRTLLVSSHCYLSTQLSVSLRKTMLAMLLLRSWRVLRQKPRCSEMVVGLRKRQPSLCLGTSSVLSWEISFPQMLASWKEIL

SEQ ID NO: 53895 - protein, 902 aa, Oryza sativa
MAPPRTSGLLLLLAAVVAAAAVVLVPPAEAAVASIDLGSEWLKVAAVHLAPGRVPIAVAINEMSKRKSPALAALADGNRLAGEEASGITARHPSKVFARARDLLAKPFPYVRSVAEALFLPYDLVPDARGAAAVRADDGQVYTVEEIVAMVLHYAAGLADAHVGAPVRDAVVAVPPYFGQAERRALTQAAQLAGVNVLALINEHAGAALQYGIDKDFSNESRHVIFYDMGAGSTYAALVYYSAYKAKEFGKTVSVNQFQVKDVRWDSKLGGLEMEMRLVNYFADQFNKQLGNGVDIRQSPKAMAKLKKQVKRTKEILSANTAAPISVESLYNDLDFRSTITREKFEELCEELWEQALTPVKEVLAHSGMKIDDIYAVELIGGATRVPKLQAKLQEFLGRSDLDKHLDADEAIVLGASLHAANLSDGIKLNRKLGMIDGSTYGFVFEINGPDYVKDESTDQLLVPRMKKLGIKMFRSIRHTKDFDVSISYEKASELPPGVTSHKFVEYSVSGLTDASEKYSSRNLSAPIKANLHFSLSRSGIISLDRAEAVIEITEWVEVPKKNLTLESNSTSQTLSSEGGAANDTSDSKENVSSDGDANKSSAPIDESNAQDIVTEKVLKKRTFRVPLKVVEKMAGAGSILSKELYSEAKTRLEALDKKDAERRRTAELKNNLESYIYSMKEKLEENTEILTVSTEQERESFAEKLNEVQDWLYMDGEDAQANEFKERLDQLKAIGDPILFRLSELKARPTACENARLYLAELQKIVKNWDSNKPWLPKKRVDEVVSEAEKVKTWLEEKEAIQKSTPVYSPPAFTSEEVYERVLDLQDKVSSVNRIPKPKPKIEKKPPKEEESANKEKTDSSESESKEAESTETSSESAAPEESQSEPQKTDDLEPEAHDEL

SEQ ID NO: 53896 - protein, 665 aa, Oryza sativa
MRFYFVYLRLDWLWSLNLFALILLNFLEKPLWCRGYSQHACDQRDLYFLGQLPYLSKTESLIYEGLTLVILVMDIFYPLSYEGLNLFWKNTINKLKVLLLFILACDILVFAFSPQPFRVAPYIRVAFLIMNIRELRMCAVTLVGMVGTYLNVLALSLLFLLFASWLAYVTFEDTPQGKTVFSSYGTTLYQMFILFTTSNNPDVWVPAYKSSRWSSLFFIVYVLLGVYFLTNLILAVIYDSFKEQLAKQVSQADCTRKSILEKAFGIIDATGQGYLNKEQCLSLLDELNKYRSLPKTSREDFELIFAELDQSGDFKVTSEEFATLCNTIAIKFQKEPPPSYLEKYPSFYHSALCEWLKSFVRSPLFEYIVIFVLLMNLVAVIIETTLDIENSSSQKVWQEVEFVFGWIYVIEMALKIFSLGFGGYWMEGQNKFDFVLTWTIFIGETLTFAFPSKLSFLSNGEWIRYLLLGRMLRLTRILLQVRRFRAFVATFFTLMSSLMPYLGIVLCTLCIYCSLGLQIFGGIVYAGNPTLEETDLFSNDYLLFNFNDYPSGMVTLFNLLVMGNWQAWMESYRQLTGSYWSLIYFVSFYLISVLLLLNLIVAFVLEAFFAEMELEKDGEADIQDPTLEGRNRRRSVRVRTKGTMVDILLHHMLSNELDGSQNRDQ

SEQ ID NO: 53897 - protein, 45 aa, Oryza sativa
MGTSYQSLCTSLLRLSSFCRLCSSTKTFICIMRRPTHRLMLEHPT

SEQ ID NO: 53898 - protein, 936 aa, Oryza sativa
MASRFWGQGDSDSEEEEQEIESEAGSESEDEGGDAGGRSNQNRYLRTTNASDSDESDSGQRVVRSLKDKRNEELKITVDQMRNAMKINDWVNLQESFEKLNKQLEKVVRVNESTTVPNMYVKALVLLEDFLAEALANKEAKKKMSSSNAKALNAMKQKLKKNNKQYENLIQECREHPERFEDDDVEDKDDDDETDDDASDADIEDPEKMVMSESEEEGDDDEEGDQDGGAWEKKISKKDKLMDKQFLKDPSEITWDIVDKKLKEIVASRGKKGTGRIERVEQLTFLTRVAKTPAQKLEILFHVISAQFDVNPSLLGHMPVNMWKKCVNNMLLVLDILQQYPNIVVDTSVEPDEKETQKGADYDGQIHVTGDLVAFLERLDSEFFKSLQCTDPYTKDYVQRLRDEPLFLVVAQNVQDYLERVGNFKAEAKVALRRVELVYYKPQEVYDAMRKLAEQDEDSREDDDADADEERQVVDDNRGPPPFVVIPEVVPRKPTFPESGRALMDALMSVIYKYGDERTKARAMLCDIYHHAISDKFSVARDLLLMSHLQDGVQLMDISSQILFNRVMAQLGLCAFRAGLIIEAHGCLSELYSTGRVKELLAQGVQQSRYHEKTPEQERLERRRQMPYHMHINLELLEATHLICAMLIEVPNMAASTYDRRKSMNRTFRRLLEISERQTFVGPPENVRDHVMAATRALRKGDYQKAFDVINSLEIWKLLRNKEHVLEMLKLKIKEEALRTYLLSYSSCYESLSLDQLTTMFDLSEQQAHSIVSKMMMHEELHASWDQPTKCIIFHNVDQTRLQGLLFQMSDKLSVLVESNERAYEAKTGGTLEGAPPRRRGGDGQDSSNLGKWQENFVSSQGRQGGGRSGYSGRVGGPGRGGGGYQRDRGSQGSRGGYGGGSRFQDGGRSRNQSGSMARGGDGGARMVSLNRSGRG

SEQ ID NO: 53899 - protein, 467 aa, Oryza sativa; identical to SEQ ID NO: 36125

SEQ ID NO: 53900 - protein, 478 aa, Oryza sativa
MLLLKAVYRVVVNNFLALAAAAVAAVLLRRPDELAARLRAVSSPLHAATAAVLAAGVARLVRARRARGVYLVEYGCFRPRPCYRAPFATCLEHAHLMPYLVDEESVAFAIRLLERSGLGDETCVPDAYHYMPPDRSLRASRDESELVIFSAVDDVFARSALTPADIDVLIVNCSIFTPTPVFADMVVNRYKLRAEVQNVNLSGMGCSAGLVSVGLAKNLLQVSPPGTNVLIVSTEILSSQYYVGTERAMLLPNCLFRMGAAAMILSNSPDHARFRLGRVVRTVTAARDSDYRCVFQEEDEQGNTGIRLSKDLATTAGHALKSNIAAFGPLVLPASEQLLVAISFLKRKLKQLSGHAGKVRLYRPDFRTAFEHFCIHAGGRGVIDEVQHGLGLSDDDVGASRMTLHRFGNTSSSSVLYELAYLEAKGRMKRGDRVWMISFGAGFDCNSVAWECVKPAPDADGPWVDCIHRYPVQLPEIA

SEQ ID NO: 53901 - protein, 512 aa, Oryza sativa
MEKLKSELWMTAVATCMSLLLYLTILRRRHASGGRSLALPPGPTPLPLIGNLLCLGGIFHQTLAKLARVHGPVMTLKLGLTTAVVVSSAEAAREAYTKHDQRLAARPVPDAFRANGFSERSIVFSPSSDPQWKNLRGIHATHIFSPRALAALRGIRERKVRDIVGYIRTVAGEEMCVREVVHNGVLNLISTSFFSMDMADVRSESARGLRGLIEDIIATVAGPNVSDFFPFLRQLDLQGLRRQTGSHLGIVFGLLDDIIDRRMAETRDHPDKQRHGDFLDALISLASAGKIPRYHITYLLFDVFAAGADTMTTTVEWAMAELLRNPRVMAKVRAEVTDALGGRESFDEGDAASLTYLQCVFKEAMRLHPVGSILVPHLAVQDGVEIGGYAVPKGTTVIFNAWAIMRDPAAWESPDQFLPERFLHKEESSSPPLELRGKDYEYIPFGSGRRLCPGLPLAERAVPFILASLLHAFEWRLPDGMSPDDMDMTEKFATANVLATPLKAVPVASHTS

SEQ ID NO: 53902 - protein, 439 aa, Oryza sativa; identical to SEQ ID NO: 35328

SEQ ID NO: 53903 - protein, 199 aa, Oryza sativa
MLRGGTSLLGIVNFVTFLISIPILGGGIWLASRANSTDCIRFLQWPIIAIGLAVMVVSLMGFAGACYRQTWLIRLYLFAMFFIVVALLFFIVFAFAVTDRGDGQVVMNRRFLEYQLSDYNGWLRDRVADPAYWATISACLRDGRACAAMRRFARDPNTGMLVPETPSMFYARDLSPIQVTTTISLPLSLSLSLSSLSLS

SEQ ID NO: 53904 - protein, 422 aa, Oryza sativa
MVRGSLGKLASRALSVAGKWQHQQLRRLNIHEYQGAELMGKYGINVPRGAAAGSVEEVKNTLKNVFPSEKEIVVKSQILAGGRGLGTFKSGLQGGVHIVKAEEAESLAAKMLGQILVTKQTGPQGKIVSKVYLCEKLSLVNEMYFAITLDRNTAGPLIIACSKGGTSIEDLAEKYPDMIIKVPIDVFKGITDDDAAKVVDGLAPKTADRQSSIEQIKKLYELFCKSDCTLLEINPLAETADNKLVAADAKLNFDDNAAFRQKEIFAMRDTTQEDPREVAAAKADLNYIGLDGEIGCMVNGAGLAMATMDIIKLHGGTPANFLDVGGSASEGQVVEAFKILTSDDRVKAILVNIFGGIMKCDVIASGIVNAAKQVDLKVPVVVRLEGTNVDQGKRILKESGMTLITAEDLDDAAEKAVKASVK

SEQ ID NO: 53905 - protein, 412 aa, Oryza sativa
MFTIFLGILFSTTVLVYLQDNVSWTVGYGIPTLGLMVSVAVFLSGTPLYRHKVPQGSPLATMGRVVAAAVWKWRVPLPADSKELHELELEHYTTRRGFRMDATVSMAFLNKAAVKPGEGGGGSVARLPGWTLCTVTQVEETKQIVKLVPLLATMVVPCTLVAQAGTLFVKQGVTLDRRIGKFHVPPASLGAFVTATMLICIVLYDRFLVPAVRRRTKNPRGITLLQRISLGMLLQIVTMVVTSVVESQRLGYARRHGLVATGGQLPVTIFILLPQFVLLGVADAFLVVGQIEFFYDQAPESMKSLGTAMSLTAYGAGNLLSSAILAAVERVTGGGKGRTPWVTNNLNASRLDYYYAFLATLAAANLLAFVVLSCKYSYRVESTETIDVDVAMDNVAQGGGVVTVKSEAAPMA

SEQ ID NO: 53906 - protein, 463 aa, Oryza sativa
MHTRSRRLGFPPLNPSHLLLTPHLPPLSSDRARMAMSRAAAAAAGTPVARRRLMGAVAARSMASWFGHVEPAAKDPILGVTEAFLADPSPDKVNVGVGAYRDDSGKPVVLECVREAERRIAGSMNMEYLPMGGSIKMIEESLKLAYGENCEFIKDKRIAAVQALSGTGACRLFADFQKRFLPDSQIYIPTPTWANHHNIWRDAQVPQKTFTYYHPESRGLDFAGLMDDIKNAPDGSFFLLHACAHNPTGVDPSEEQWREISHQFKVKKHFPFFDMAYQGFASGDPERDAKAIRIFLEDGHQIGCAQSYAKNMGLYGQRAGCLSILCDDEMQAVAVKSQLQQIARPLYSNPPVHGALIVSTILGDPELKSLWLKEVKGMADRIIGMRTALKENLEKLGSPMSWEHITNQIGMFCYSGMTPEQVDRLTKEFHIYMTRNGRISMAGVTTGNVAYLANAIHEVTKTK

SEQ ID NO: 53907 - protein, 446 aa, Oryza sativa
MDDQRLQWRKPGSFLLVAGVFLAAAAAVSNAGIGEFDEHWEKRRAAAEAAAEEVYKPDPFNVTNEFNHAVIRSTERGVLRRELSGKNSKYKGPCLATNPIDRCWRCRKDWATDRKRLARCAMGFGRGATGGVRGKIYVVTDPGDGDAANPRYGTLRWGAMQAAPLWITFAKSMVIRLTQELLVASDKTIDGRGAQVHIARGGAGITVQFARNVIITSLHVHDVKHSDGGAVRDSPTHIGPRTRADGDGISLFAATDVWVDHVSMSMCEDGLIDVVQGSTGVTISNSHFTNHNDVMLFGASDSYPQDKVMQITVAFNHFGRGLVQRMPRCRWGFFHVVNNDYTHWLMYAIGGGMSPTILSQGNRYIAPPNIAAKLITRHYAPEWEWKNWAWRSDGDLFMNGAYFQASNGAINRKVKGSDMVKPKPGSYVRRLTRFAGALSCRPGEPC

SEQ ID NO: 53908 - protein, 107 aa, Oryza sativa
MSTGNMLADLFSINGYHEGLPMVLAHIATYAALALPPTVDARHHSRRGQEDLDHLVIFGAMNPATSANGAAAIIDPPSSTVQWASSHAYASCPSLLAGHQVEKPSIC

SEQ ID NO: 53909 - protein, 577 aa, Oryza sativa
MASLFRARRRRSPEDDGEGEDGSASGRVTRRRLSPEEGALSLAEASASVAAVGAGAESSPGWLSSIVSGARRVISSVLFSSPEEAASGEEEEDDDEEDETEDNHGAIVSYNESKLAIEEMVMKETFSRDECDKMVKLIQSRVTDAALPEAPEYGTPKEIPTRNTVVGNDFTGAWRSLSRHRNGTEPVPFSSIGSGSFSPGSPLHASPELLSAAVMEAKKWLEEKRQGLGSKPEDHGPCTLNTDMLNSGFESDMGSPVDLAKSYMQSLPPWQSPFLGSQKFKTPPSAGLHMYDYEGKSKYSLPSSKVTTKEEYLSNFWENLEESRRSRLGSSGSSPDASKVRQYGSTSRLFENDTSIFSSGTDKKVDKPEQNNKGSDKVAGAEPANGHSSPITDKNHVFVDPVDPANDIGNVVKECNAASKVHIEEISQGNQISSTSVTKDADRDGDVKAPVAEPEIHMESDINSASELRTKDTGPHIHASLNGSTKKTSANGLRDQSNANSGVESSGNDNPSCTNSSTGVPPTNNEVNDPKADAADGDSVENGTRLNSEEPAQVDPKPAYVRRGRKRVVRGTRGRAK

SEQ ID NO: 53910 - protein, 946 aa, Oryza sativa
MLIPLAHLPRPPPLTASAIFRPRAPRLLASLSLATPPPPLLAASAFASLPLRALLSESQREVEMVGESEGRPLRVGLVCGGPSPERGISLNSARSVLDHIQGEDLLVTCYYIDCGMNAYAISPAQLYSNTPSDFDFKLESLAQGFQSLFDFAQHLAANVDIVFPVIHGKFGEDGGIQELLEKANVPFVGTPSKNCLLAFDKYNASLELNAQGFLTVPNFLVEKDKLAKSKLEEWFQSINLDKENGKVVVKPTSAGSSIGVVVAYGANDAAEKAEGIISEGIDDKVIIEVFLEGGTEFTAIVVDVGTANNSEPVVLLPTEVELQSSSNIDIQEDTIFNYRRKYLPTRQVAYHTPPRFPSEVIDCIRQGVSILFRCLGLRDFARIDGWFLPTPVTSLPSAENTGKFGNTKYGAVLFTDINLMTGMEQTSFLFQQSSKVGFSHSRILRTVVQHACSRYPSLVPCSNAWTALSRKIQAAKQAEAIQKGTSKKKVFVIFGGDTSERQVSLMSGTNVWLNLQGFDDLDVTPCLLTSGNGYSSFHNQNMNGISRDVWTLPYSLVLRHTIEEVNAACIEAIDPERMELTSRLRDQVMNELGQSLSKYDWFAGFDIADKQPIKYSLQQWINHVKETQAVVFIAVHGGIGEDGTIQSLLGSAGVPYTGPGQIASRTCMDKVATSLAVSHLASYGVHTIPKDLRATEEILKSSPDDIWNDLKAKLQTETVCVKPARDGCSTGVARLCCPKDLEVYANALERKLQRMPANCLSRAHGVIEMPVSPPESLIFEPFIETDEIIISTKSVDDSTRHLVWKGENKWLEVTVGVVGKRGEMLSLNPSITVKESGDILSLEEKFQGGTGINLTPPPSTIMSEEALQKCKSCIETLANTLGLEGFSRIDAFVNVQNGEILLIEVNTVPGMTPSTVLIHQALTEKPPIYPHKFFRTLLDLAFARAN

SEQ ID NO: 53911 - protein, 514 aa, Oryza sativa; identical to SEQ ID NO: 52901

SEQ ID NO: 53912 - protein, 391 aa, Oryza sativa
MECNYLVWVAYSGLGNRILTMASAFLYAILTRRVLLVDSDKGTADLFCEPFPETSWLLPPKFPIKQFKNFSNGSPESYGNMLKNKAIRSNPAFLYLHMAHDYSDYDKLFFCEDNQQYLRNIPWLILKSDNYFVPSLFLIPAYQEELTRLFPQRDSVFHHLGRYLFHPSNVVWGMVTRYYDSCLARADERLGIQIRVFDPEPGPFQHVLDQVLACTLKENLLPAINSKQPIVSTRHSRLKSVLITSLNSGYYEKIRSMYWEHPTTNGEMISFHQPSHEEHQNSDKKMHNMKAWAEIYLLSLSDVMVTSAWSTFGYVAQGLSGLRPWLLFKPENRIAPDPPCRQVLSMEPCFHAPPFYDCKAKRGADTGKFVPYVSHCEDMSWGLKLVDQSEW

SEQ ID NO: 53913 - protein, 203 aa, Oryza sativa
MTCADIFKAYGDLMVDSIDPLLVQLFLKSSQDKRFVCEAAEAALISMTSWIAPSALLPKMQPYLKNRNPRIRAKASMCFSKSVPSLGVEGIKEYGMDKLVQIAATQLSDQLPESREAARKLALELQAFYEKSQASSSGEVDDAPATSPDADADAGAESWEAFCQSKLSPLSAQAILRVTSTTKEGVAVGVTSTPPKEGVTVGC

SEQ ID NO: 53914 - protein, 421 aa, Oryza sativa
MDEEQLRALLRDLDALKQRPDPAAIDRMRERVAGMVTSAAAARSKIKDMSSEVVDSNPYSRLMALQRMGIVDNYERIRDYSIAIVGIGGVGSVAAEMLTRCGIGRLLLYDYDTVELANMNRLFFRPDQVGMTKTDAAVQTLSGINPDVTLESYSLNITTVKGFETFLGSLKARSSDGRNTGVDLVLSCVDNYEARMVVNQACNELGQTWMESGVSEDAVSGHIQLLVPGETACFACAPPLVVASGVDERTLKREGVCAASLPTTMGVVAGLLVQNALKYLLKFGQVSPYLGYNSLKDYFPTMEMKPNPQCSNPACVQRQKEYMQSKPARDAAAKAKMEAEASAADECPVHLDNDWNISVVDDSDTVTPSILSTGADSLPEGLVRELPTADSYQEPVAPVTSGAIDDDLEELQRQLDALNSS

SEQ ID NO: 53915 - protein, 416 aa, Oryza sativa
MAPPPHSDSDLLKPRDVCIVGVARTPIGALLGSLSSLPATKLGSVAIQAALRRANVEPALVQEVFMGNVLSANLGQAPARQAALGAGLPDTVPCATVNKVCSSGMKAVMLAAQAIQLGMHDVVVAGGMESMSNAPKYVAAARRGSRFGHDVLIDGMLKDGLWDVYNDFPMGMCAELCADQHSISREEQDLYAIQSNERAIAARDSGTFSWEIAPVEISSGRGKPPLIVDKDESLAKFNSAKLRKLGPTFKKNGSVTAGNSSSISDGAAAIVLVSGQKAKSLGLQVIARIRGYADAAQAPELFTTTPALAIPKAVSNAGLQTSQIDYYEINEAFSVVALANQKLLGIPSGKLNLSGGGVSLGHPIGCSGARIIVTLLGILRHKNGKIGVAGVCNGGGGASALVVELMQPSLFTRSSL

SEQ ID NO: 53916 - protein, 445 aa, Oryza sativa; identical to SEQ ID NO: 30118

SEQ ID NO: 53917 - protein, 449 aa, Oryza sativa
MAEDAPPSSLPLLLPRKSLSSSSAQRKQQYARCVSHAGDELHSFRSCLAWMCVDHSTRARGAASWAAFLLLAVAAPSAATLALPSPVGGGGSPFDGQVQVSLTLAAALAYLTLTALLQGRGLRRLLYLDRLRDDSEEVRSGYIEELAGSFRVLACFLLPCTLAEAAYKAYWYLAAPPFRSPWWSAAACAVEVASWAYRTAVFFMVCVLFRTICYLQILRMKGFAREFCRFADVAAVLESHRRIRKQLHRISHRYRRFILCCLVLVTTSQFAALLATTRPHAQINLATAGELALCSLSLVAGLLVCLQSAAKITHKTQAITSVAAGWHADATINAFDNDQEDPNPDLPRIVGYLVPVNAYWMASGESSSDSSSSSSSSDDDDSGHPKSKYIPFQNNHCFQQRQALVTYLENNRAGITVYGFVVDRTWLHALFMIEFSLVMWLLGKTVGIS

SEQ ID NO: 53918 - protein, 575 aa, Oryza sativa
MASPPAAAPPEWVVLDRLPLTSIDLPKDGISLSLVATPRISQLLVSPSLGLASGSVLAADPSGILLLSSSDPFLADSKSYVLWDAVYKISFPVPATPTETGAATGLVVVPGGSDHIYIMVAELSIRGSDVILRCFSTDPAKWIHKILQQPPQYKLLWCWCSDYALSHQGRLWWVDLLQGLVACDPFSDNPELHFVPLPSCCRNPNVQQSCRMGLSDNRRVGLSRGKLRLVVLSHASNSKSRIRLWTLADSEAGHWTLDFDLSSPVFDDIWTDLCDWKIAFFHPSKPHVVYFSQKQHLVAVDLQMVKVSEEDGVEPCSSSHVLAWELSPSLRTTLLVAGPSPAQDTNSTSHFDSVANSFLEAYSSALVDMEFHQLATTALASLNKEKKRTEENKFKLSERLLLQTFLDQTETSLKKYAHLNFYAGTGSEKVLVFAEFHTDAVGDNEPDEWGLSSCKLLRKNYQGGLYGEDADRRLSMRANKRKKSIYCFACAAEMLHPINGFDGGYAGMSVTRGVGAGDSQAGGGERRRSERREVRGKSVTPAHPLTEPEELKQSKTEQGGKKKYAFSFRKHNMFR

SEQ ID NO: 53919 - protein, 518 aa, Oryza sativa
MNMESLAAGAWWVVVLLLLVLTIVASWYRSWWKTTEAGGPLLPPPAAGAGPWWVWVWQWRETAAFLASHGSGRGFYHFVQERYKLYKGEGEGEATCCFRTALMGRVHVFVSASHPAASQLLTAEPPHLPKRYARTAADLLGPHSILCSTSHAHHRHARRALATTLFATPSTAAFAAAFDRLVIRHWTTLLPPHNQNQVVVVLDAALHISYRAICEMLLGAGGGKLRPLQSDVFAVTQAMLALPLRWLPGTRFRRGLHARKRIMAALREEMAARNHHHHHHHHHHDLLSVLMQRRQLGHPDALTEDQILDNMLTLIIAGQVTTATAITWMVKYLSDNRLIQDKLRAEAFRLELKGDYSLTMQHLNAMDYAYKAVKESLRMATIVSWFPRVALKDCQVAGFHIKKDWIVNIDARSLHYDPDVFDNPTVFDPSRFDEEGEGDDAKLGRAQPQKRRLLVFGAGGRTCLGMNHAKIMMLIFLHRLLTNFRWEMADDDPSLEKWAMFPRLKNGCPILLTPIHNS

SEQ ID NO: 53920 - protein, 534 aa, Oryza sativa
MAWCLVFMVFLIYCLISTVGLPVAPADEAAMQLGGVGGGRLSVEPSDVMEASLDFGRLTSAEPLAVFHPRGAGDVAALVKAAYGSASGIRVSARGHGHSISGQAQAAGGVVVDMSHGWRAEAAERTLPVYSPALGGHYIDVWGGELWIDVLNWTLEHGGLAPRSWTDYLYLSVGGTLSNAGISGQAFHHGPQISNVYELDVVTGKGEVVTCSESNNPDLFFGALGGLGQLGIITRARIALEPAPHRVRWIRALYSNFTEFTADQERLISLQHGGRRFDYVEGFVVAAEGLINNWRSSFFSPQNPVKLSSLKHNSGVLYCLEVTKNYDDSTAVTVDQDVEALLGELNFIPGTVFTTDLPYVDFLDRVHKAELKLRGKGMWEVPHPWLNLFVPASRIADFDRGVFRGVLGSRTAGGPILIYPMNRHKWDPRSSVVTPEEDVFYLVAFLRSAVPGSTDPAQSLEALERQNREILEFCDEAGIGAKQYLPNHKAQREWEAHFGARWARFARLKAEFDPRAMLATGQGIFDSPPLLAES

SEQ ID NO: 53921 - protein, 765 aa, Oryza sativa
MQGGGPLSPDEHRATSPPGIMHHQPAMTIVVAVDRDRNSQLAVKWVVDHLLTGASNIILLHIAVHPPAANHGFAMAEATHGALEAEMREIFVPFRGFCTRNGVHVSELVLEEADVSKALIEFITVNKIQSIALGASNRNAFTKKFKNADVPSSLMKGAPDYCNIYVVAKGKSVNVRLAKCGVDGGCGGGGGYEGDSSIRSLYTRRCSRGKLPPATPSPDSSRRSVDSRTLPELTTRPPFRERSLPSSSSKPVVLSSRAAPDCGGGGVDGSYRSTRRSVSNESFVGDLDFGQSSRFSSMDFCDSLDMSSLSASPRESSSPLSAPQREVEVEMRRLRLELKQTMDMYNAACREAINAKQRTKELQLLKLEEARRLEEARHAEEAALAMAEMEKTKCRAAMEAAEAAQRLADMEAQRRRNAEVRARREADEKVRALDAISSHDFRYRRYNIDDIELATERFSDELKIGEGGYGPVYRASLDHTPVAIKVLRPDAQQGRKQFQQEVEVLSCIRHPNMVLLLGACPDYGCLVYEYMDNGSLEDRLFRRGGTPPIPWSQRFRISAEIATALLFLHQTKPEPLVHRDLKPANILLDRNYVSKISDVGLARLVPPAVADSVTQYRLTATAGTFCYIDPEYQQTGKLGVKSDIYSLGVLLLQVLTARPPMGLTHHVEKAIDAGTFAQMLDVTVKDWPVDDAIGFAKLALKCTEMRRRDRPDLATVILPELNRLRNLGHAYEARMSAAAADAAAHAQDNVGSPTVVGASWRTAES

SEQ ID NO: 53922 - protein, 620 aa, Oryza sativa
MWRHAARRSSAQIRRSGVMSSSSSPAAPAAAAGAAVPGPCIVHKRGTDILHDPWFNKDTAFPMTERDRLGLRGLLPPRVMSFEQQYDRFINSFRSLEHNTRGEPDTIVALAKWRILNRLHDRNETLYYRVLIDNIKDFAPIIYTPTVGLVCENYSGLFRRPRGMYFSAKDKGEMMSMIYNWPAEKVDMIVVTDGSRILGLGDLGVQGIGIPIGKLDVYVAAAGINPQKVLPIMLDVGTNNTKLLEDKLYLGLRQPRLEGEEYLSVVDEFMEAVHARWPKAVVQFEDFQMKWAFETLQRYRNRFCMFNDDVQGTAGVALAGLLGAVRAQGRPLSDFTKQKIVVVGAGSAGIGVLNMAKQAMLRMPGINRSGEGHNQFWVLDKDGLITKSRKGLDPVVARYARGFGPEEVQDLHEGASLVEVVRKVKPHVLLGLSGVGGIFNEEVLKAMKESDSPRPAIFAMSNPTTKAECTPEDVFKYVGDNAVFASGSPFSNVTLGNGRQGYANQANNMYLFPGIGLGALLSGARHITDGMLQSAAECLASYITDDEIRKGILFPSISSIRHITARVGAAVVRAAVDEDLAEGRCDVDARDLKSMTEADTVDFVARKMWYPIYSPLVNDK

SEQ ID NO: 53923 - protein, 483 aa, Oryza sativa
MAPPPRLPAGAAALLLLLAVASRAAADGNAVDVGVNWGSQLSHPLLPKSVVQMLKENGILKVKLFDADPWPVGALVDSGIEVMLGIPNDMLETMNSYGNAQDWVKENVTSYGDKLKIKYVAVGNEPFLKAYNGSFMKTTFPALKNIQKALNEAGVGDKVKATVPLNADVYVSPDNKPSSGAFRPDIQGLMTDMVKFLHEHGSPFVVNIYPFLSLYQSDDFPFEFAFVDGGKTIQDKGGISYSNVFDANYDTLVTALKKAGVPSLKVVVGEVGWPTDGDKNANLKLARRYYDGLLKKLSKKEGTPLRPGKMDVYMFGLFDEDMKSILPGNFERHWGIFTYDGKPKFPMDLSGHGNDKPLAGVPGVEYLPKQWCVFDDGAEDKSKLPGNIQYACASGDCMALGYGCSCNGLDEKSNISYAFNMYFQMQDQDVRACDFDGLAKITTKNASARGCAFPIQIISAAAPAVAGVGLSAAALLALLMVLV

SEQ ID NO: 53924 - protein, 971 aa, Oryza sativa
MGTVNGEYEDFDAANRRAEVIDWLGGLLPEFDLPLDSSDEELRDYLINGEALCYVADKLMPGVLEGTWGGYASDQRSNVKKFLSVVAEMGLPGFGVKDLEEGSMSSIVECLLALKDNVATQLGGHISNSTAKTPIRRKLELRETDGPVLSVATPGKRYPKSQQRSPLLSGQKINEVVQFKHGTYTDLPAAKISEMLHSNSLDNAPTQSLLRVVNGILDESIERKRGEIPHRVVHLLRNVIQEIEHRIGIQADHIRNQNSIIKTREDKYRSKIKALETLVNGTNEENEMAINRLEVVKVEKSKIDEKRKLGEQDMIRLIREKENAENIIASLHQEMQVMNRMHEQFREQMETKARQMEEHLTLRAKEAEFCLMQSKKKVEEVEATSQLKSQLWSKKANIFQSFMNNQKLSIKDIKISSQSIKQEMYALQMTWRDEISNIGHDLKGLVDAAENYHKVLAENQKLFNEVQELKGNIRVYCRVRPFLPGQDGKLTAIDYIGENGEILIANPSKQGKEGYRMFKFNKVFGTHSSQAEVFSDIQPLIRSVLDGFNVCIFAYGQTGSGKTYTMSGPGTSREDWGVNYRALNDLFDISLSRKNAFSYEVGVQMVEIYNEQVRDLLSNDIAQKRLGIWSTSQPNGLVVPDASLHPVKSTSDVLDLMEIGQSNRAVGSTALNERSSRSHSILTVHVRGLDVKNGSTSRGCLHLIDLAGSERVERSEATGDRLKEAQHINKSLSALGDVIFSLAQKNAHVPYRNSKLTQVLQSSLGGQAKTLMLVQINPDIESYSETISTLKLAERVSGVELGAARSNREGKDIKELLEQVASLKDTIARKDMEIEQLQLLKSKSPNSMTDRNGSNLLRQSTSSTGLSSLPVASQQNQQLSGSVEAEAEDNASDDGCSVGETEYSPAGASETSAERAHKAPSRITRFFLTKNGQPSTSRPKPREVVPKTQGSMRPGTAQATGGSLAKPSKRR

SEQ ID NO: 53925 - protein, 217 aa, Oryza sativa
MWAPHVRVSALAPFLFPQFSTFLLSLSSPLCRATAGGEEVIRVRWERLAAVVATLEKGGGSRRLPTTWRWQEKGEHHRACDLRVAPSKRLERRARPMGEELGATSRGGVAIPGRGRDLRGGGVHPPHPPPASPPPSSSRSSSSSSSTSPSPTPSSPTSTPTTPPSTPPPPAPTPNAISSTASPTTGSPSSSSRLPTSSPSSSRPTMQLAEGYRRVCI

SEQ ID NO: 53926 - protein, 65 aa, Oryza sativa
METFHPFETGRVLGCFKGILACQNSRDVRIKSQLMIKKMDFPTSYKYPAVLQLFAIIFVPRWNVP

SEQ ID NO: 53927 - protein, 530 aa, Oryza sativa
MMAAHHHHHEHHHLLDMSSPPNASGAIISSFDHAAGLLSLHDVAAAADHHHHHLRGGGGGLQLPSPWSQQQVSLSLYNNAAGAAGSPPSSLVAHQQLAAAQPLMFQLRGSKYLGPVKALLAEFCSLDVEAMDGAKQQRPPNPNPKIGKWDDVEGSGSWGNLSLSSMDLLDLERRKARILSMVEEVDRRYRRYREQMRAVEVSFEAVAGGGAAQVYTKLAMRAMSRHFRCLRDALVGQVRALRNAMGESQRDAAGGVAAAAPGATKGDTPRLRVLDQCLRQQRAFQQSGAVDSFPWRPQRGLPEHAVAVLRAWLFEHFLHPYPNDVDKHILARQTGLSRSQVSNWFINARVRLWKPMIEDMYKEETKPESSDGNNKLNPSAAGNKQQHRDDPKKNYTATTAEASLVQQSSYHLHLRSSGNRNSSSLMIPAAASTSIDHHHDSSHQLLGGHSYSSAAGLHHGHGGAVSLTLGLQQQQQPFAASMMHQHQQHQHQHQQQQSFMVEAAEEEEDDVLPYRNLMESQLLHDFAGAS

SEQ ID NO: 53928 - protein, 190 aa, Oryza sativa
MASPYSTCASRSMSSSATITSIGGSWAPSAAVTAAAGDVYGWSLLVVPTGNASMTNLSTVSCVMNGVGGFSSSDGLFSGKMKPGWRRTPPARRIGSRASAPASPARAATLCTRTPPALSPMRNTREKSAASRRRSTAWCAMVSLVPHATSRSQSSAACPASMAAGRRCSGASGRTTETMPATSSSTARRA

SEQ ID NO: 53929 - protein, 246 aa, Oryza sativa; identical to SEQ ID NO: 30436

SEQ ID NO: 53930 - protein, 687 aa, Oryza sativa
MHNVVNMESKTARKSVLVSALTRFLKLGKKTTKLKGQHVAVNQSPASVQTAERMLVPLISITMSPPRGPTNTPAGETQTTQLPPQHTNNQLHSAQQVQQTVETMRNSVARTNHVSNQTSQQMRLKEQVNGQTTTSSSASIKRSPNDFIFGKTIGEGSFSSVYLAKDIHTNKEYAIKVCDKRHIIREKKTEYVKLEKEVLNILSSNSNPLAPFFVKLFCTFQDAERLYFVLTYAKNGELLPYINKVGSFDIACSRFYTAEIIMALEHLHRLRIIHRDLKPENILLDENMHILVTDFGSAKILPPEQPKDEVDGKVTRSERRNSFVGTANYVCPELLTDKASSYCSDLWALGCILYQMVGGLPPFRSRSEYIIFQQITKVEYEFPDGFHPLARDLVEKLLVLDPKQRIGAKDPAGQGYPSLRAHPFFEDIDFDSLHQTTPPPILPYLPGTSEHEELRSQYRVPDHLEPGLDDRQLTRLLGLELQSGSGGNSGGNSCSSGSSNTSSSCSSSSSERTPEANPRRKASPGPGPAPTDRDKDREKRDAKESSARESTRAAQRQRRDKLPNYSPEQALIQLDRQARENKWHPFVENNLILKEGFVEKRKGLFSRRRMLLLTEGPHLYYVDPNNMVLKGEIPWSKELRVEPKSFKIFFVHTPNRTYYLEDPEGFALDWCNVIEEMRIKTYGASRS

SEQ ID NO: 53931 - protein, 249 aa, Oryza sativa
MKDLEIKSKEFEELEERYWHEFNSFQFQLTSHQEERDAILAKIEVSQVHLELLKQTNVLNDAFYISHDGVIGTINNFRLGRLPNVQVEWDEINAAWGQAALLLHTMAQYFTPKFEYRIKIHPMGSYPRVTDIHKNTYELFGPVNLFWSTRFDKAMTWFLTCLQDFAEFAISLDKENNVPPEKSLKLPYKIDGDKVGSHTIFLSFNKVENWTKALKYTLCNLKWVLYWFIGNTSFAPPSGSLCAAQSSKR

SEQ ID NO: 53932 - protein, 80 aa, Oryza sativa
MHMLVLYAFNFVVAPVTHHPQITVHEPCSELCLLHRIAGWLSALKLRQRFWVVWKKKLHQSEMECLFDELMRAHDLFLGL

SEQ ID NO: 53933 - protein, 715 aa, Oryza sativa
MRAALFGAERSGVVDLGGIGGGNRGLFWPAGKGGLVVVEPRSVLDCTRSPSPRNSTSTLSSSQGGGGADSTGVAAVSESSAAAAEATKWGAPGEHGGGGGGGGGGGKEDWSSGCELPPIPGTLDVGLVGGEGWDTMLGNAAAAAAGQDQSFLNWIIGAAGDLEQPGPPLLDNAGFGIPAVDPLGFSLDHSLSGVASDLSSSGAHTATGGAGGGKASLGFGLFSPEATSLEQPPPPMLFHEGIDTKPPLLGAQPPGLLNHYHHQPPNPAATFFMPHPSFPEHNHQSPLLQPPPKRHHSMPDDIYLARNQLPPAAAAAQGLPFSPLHASVPFQLQPSPPPIRGAMKTTAAEAAQQQLLDELAAAAKATEAGNSVGAREILARLNQQLPPLGKPFLRSASYLREALLLALADSHHGVSSVTTPLDVALKLAAYKSFSDLSPVLQFANFTATQALLDEIGGTATSCIHVIDFDLGVGGQWASFLQELAHRRAAGGVTLPLLKLTAFVSTASHHPLELHLTQDNLSQFAADLGIPFEFNAVSLDAFNPGELISSTGDEVVAVSLPVGCSARAPPLPAILRLVKQLSPKIVVAIDHGADRADLSFSQHFLNCFQSCVFLLDSLDAAGIDADSACKIERFLIQPRVHDMVLGRHKVHKAIAWRSVFAAAGFKPVPPSNLAEAQADCLLKRVQVRGFHVEKCGAALTLYWQRGELVSISSWRC

SEQ ID NO: 53934 - protein, 36 aa, Oryza sativa
MILLPLLRHVARHLLQRPHAVGHCTLTLQLARSKYL

SEQ ID NO: 53935 - protein, 720 aa, Oryza sativa
MGSKQIVAVLQVGGEFKTDDDGQMSYSGGEAHAMHVKSDWTFKTFKHEISSTLNNLKLDSYVFKYFLPRNNKTLISISNDKDLKRMVEFHAESETTYIYVMKKADNRVKTSAVVPAASADHAVAATTPDGSKRQKICASWENAITGAGQVFEGPKEFRDALHKYAIAHRFHYRFVKNDSSRVTVECTAEGCPWRIHASKSPAKKDFMIKKVFGSHTCESESVKSHRLASQKWVASVIKEKLRDSPNYRPRDIANDLQREYGLSLNYSQAWRGKSIAQKELYSSHEEACNQLPWFCQRIVETNPGSAATVEALEDSKFRFFVAFHASIQGFVHGCRPLLFLDVISVKPNKHWKLLAATSVDGEGDMFPVALSVVDDESQENWHWFLEQLKASLPVSGELTFISNGKCGLLDEVSLIFPDSYHGYHVNYFIEEFKAQLDDSWSEELKDTMVEHVKKAMYSCKVDEFNQCIELIKVESDKLAEWLLETKPEKWSDAFFKGSRLGQYTCNVPETILQWVPSRYELSVVQLVDTIRCNLMEMMYTRREYSNSWTEPLTPSTNQKIQEEMGKALTHSVVCSTGNDGNNNVFEVCDGAVNVVNIDTWDCTCRKWHVSGIPCSHAIAVFERTDHNPLDFCAKYFTTECYRLTYAMSINPIPDIVVAAPSTDPSQGEALHQSPILTRRQVGRPKEKPADPRIAIKRAVRCSRCKGYGHNKATCKVPIAA

SEQ ID NO: 53936 - protein, 500 aa, Oryza sativa
MAPPPSLLATALLLLLLAIAGGPNAAAVAEAVRYQTLVATPLSPHPYTATAVEDDGLFQGSLAADEGGAAASTVGLRVVHRDDFAVNATAAELLAHRLRRDKRRASRISAAAGGAAAANGTRVGGGGGGSGFVAPVVSGLAQGSGEYFTKIGVGTPVTPALMVLDTGSDVVWLQCAPCRRCYDQSGQMFDPRASHSYGAVDCAAPLCRRLDSGGCDLRRKACLYQVAYGDGSVTAGDFATETLTFASGARVPRVALGCGHDNEGLFVAAAGLLGLGRGSLSFPSQISRRFGRSFSYCLVDRTSSSASATSRSSTVTFGSGAVGPSAAASFTPMVKNPRMETFYYVQLMGISVGGARVPGVAVSDLRLDPSTGRDGVIVDSGTSVTRLARPAYAALRDAFRAAAAGLRLSPGGFSLFDTCYDLSGLKVVKVPTVSMHFAGGAEAALPPENYLIPVDSRGTFCFAFAGTDGGVSIIGNIQQQGFRVVFDGDGQRLGFVPKGC

SEQ ID NO: 53937 - protein, 1072 aa, Oryza sativa
MAHRGDRFLVVVVVVVVLGVVVRPAAALSADGKALLSLLPAAAPSPVLPSWDPTAATPCSWQGVTCSPQSRVVSLSLPNTFLNLSSLPPQLASLSSLQLLNLSTCNISGAIPPAYASLAALRVLDLSSNALYGDIPASLGALSGLQYLLLNSNRLTGAIPRSLASLAALQVLCVQDNLLNGTIPASLGALTALQQFRVGGNPGLSGPIPASLGALSNLTVFGAAATALSGAIPEELGNLANLQTLALYDTGVSGPIPAALGGCAELRNLYLHMNKLTGPIPPELGRLQKLTSLLLWGNALSGRIPPELSNCSALVVLDLSGNRLAGEVPGALGRLAALEQLHLSDNQLAGRIPAELSNCSSLTALQLDKNGLTGAIPPQLGELRALQVLFLWGNALSGAIPPSLGNCTELYALDLSRNRLAGGIPDEVFALQKLSKLLLLGNALSGRLPPSVADCSSLVRLRLGENQLAGEIPREIGKLPNLVFLDLYSNKFTGALPGELANITVLELLDVHNNSFTGAIPPQFGELMNLEQLDLSMNKLTGEIPASFGNFSYLNKLILSGNMLSGTLPKSIRNLQKLTMLELSNNSFSGPIPPEIGALSSLSISLDLSSNRFTGELPDEMSSLTQLQSLDLSSNGLYGSISVLSGLTSLTSLNISYNNFSGAIPVTPFFKTLSSSSYINNPNLCESYDGHTCASDMVRRTALKTVKTVILVCAVLGSITLLLVVVWILINRSRTLAGKKAMSMSVAGGDDFSHPWTFTPFQKLNFCVDNILECLRDENVIGKGCSGVVYRAEMPNGEIIAVKKLWKTSKEEPIDAFAAEIQILGHIRHRNIVKLLGYCSNKYVKLLLYNYIPNGNLQQLLKDNRSLDWDTRYKIAVGAAQGLAYLHHDCVPAILHRDVKCNNILLDTKYEAYLADFGLAKLMNSPNYHHAMSRIAGSYGYIAPEYGYTTKITEKSDVYSYGVVLLEILSGRSAVETVVGDSLHIVEWAKKKMGSYEPAVNILDPKLRGMPDQLVQEMLQTLGIAIFCVNPAPAERPTMKEVVAFLKEVKCSPEEWGKISQQPLIKPGSQQG

SEQ ID NO: 53938 - protein, 737 aa, Oryza sativa
MASPTATTPSAPPPPPPPPAACAARYDFLNSKPPPNYVARLGRGAAGFTTRSDIGPAMGRGRGKPPGDDGDGDGGGDEEEKGYDENQKFDEFEGNDAGLFSNAGHDDDDDDREADAVWEGIDRRMDSRRKDWREARLKQEIERYRASNPKITEQFADLKRKLVDLSAQEWESIPEIGDYSLRRNKKRRFESFVPVPDTLLEKARQEQGHVTALDPKSRAAAAGAETPWAQTPVTDLTAVGEGRGTVLSLKLDRLSDSVSGVTIVDPRGYLTNLKSMKITSDAEISDIKKARLLLKSVIQTNPKHPPGWIAAARLEEVAGKLQVAQQLIQRGCEECPTNEDVWLKACRLASPDEAKAVIARGVKEIPNSVKLWLQAAKLETSDLNKSRVLRKGLEHIPDSVRLWKSVVELANEEDARLLLHRAVECCPFHLELWLALARLETYDQAKKVLNKAKEKLPKEPAIWIMAAKLEEANGNTESVNEVIERSIKTLQGKGLGIDREAWLKEAEAAEHAGSVMTCQAIVKNTIGVGVDDEDRKRTWVADAEECKKRGSVETAPAIYAHVLSVFKFKKSIWLKAAQLEKRHGTEESLYILLSKATTYNRHAEVLWLMYAKEKWLAGDVPAAQTILQEAYAYLPNSEEIWLAAFKLEFENNEPERARILLSKARERGGTERVWMKSAIVERELGNVDEERKLLEEGLKLFPSFFKLWLMLGQMEDRLGHVAKAKEANENALKHCPN

SEQ ID NO: 53939 - protein, 462 aa, Oryza sativa
MEGGAPREERTRNASAALQREPWAGEVMKVWMRKSEEGVEAASATASAAVRSGWTWRSRERRRRAVRMAVRSAMREGRRSAETRGVRRSSSEREEVEEVLERRWRRRRRAEAAGRGEGRDERTAARPPPPMRRRRASRCRAESGEGKAERAPTSSPAAPRQRRRRRRGGGGGGGGVVVVSWRRFRDGSPPYGRGGRSYGRGSGAPGKEFINIDGEYVHRNDPNLSPREGDWICQNPNCGNLNFARRTHCNNCNKYRYSREVCEPGHSPHRDYVNPPRGPARNLGPSDRAPPREMARYGSPPRGWGSDPKGYPARSPPDHAGRYADPVQRERMGFRGDCQLRDRVKHDWSSAEDYNPRERPHDMYLERSRRRSVSPRDNWGHNMRDRSRSPAGGRLKGSFTGGGRPDLYADPYAGRGRPNNLDDVRGRGRGRGRGYIPGGATYLGKGRGDRRAAPSSRNDGSY

SEQ ID NO: 53940 - protein, 133 aa, Oryza sativa
MVCGGDVRGRRPLPTSRRPARALPPLPPAPARRYSSPVGCPDELASSLAALRRPPSPPARRAPPLLFLPPTGRACAADPLPPAAARHTLPPVSAPLLEMDGKTLYNELEVVEGMKLDRGSLSLLHYQPKEPEM

SEQ ID NO: 53941 - protein, 429 aa, Oryza sativa
MSPESKKALVEGGGDDRISFLPTALLQHVLSFLQAKEVVRTCVLARRWRHLWKSMPILRVTGAGDARAFHTFTYHLLLLRDRSPLESCTFDFNVFSKDDMPIVNLWIRYVLLCQVRVLTLAIGGHQLTDLPVVSPILTRLELSRLSVNGKFLDFSSCPALKELKMTNCEISADKISSKSLKRLRICECKFKSKMRTRISVPSLLFLKLIAVKGRTPFLEDMPVLVAAKVLLLDFYCKDCCDGNDPGYCPAGCTHCYGIDDGSAGCVLLKGLADATNLELIADPEVFILKRDLRWCPTFTNLKTLLLSQWFESSDHCALICILQHSPVLEKLTLQLSKKSVINVRSRAIYNSMEKSFTSENLKTVEVKCQDIDQRVHKLMKSLNSYGIPLERINIQQTNQFSECFNFVWTGFIPRQSCGRPGLSMYLNSP

SEQ ID NO: 53942 - protein, 607 aa, Oryza sativa
MDLRRPTTRSSSGGVEPRYRQVGFVTTTAEPAAAAASSSSSPRGSDVYPGSLSPVMIPPPRIPDHLTALSPAPVSLLPSSPPPPSSSRLDAAESDLDDDDDDDVDVSWARPPPPALLESKEGLPDTQNEGAPAPAPVQQKQKLSKAERRAIQEAQRAAKASAKEAGLSRKSVATVSTSNAAMSKQLKTVKTPPKKDLPQLTPPVASEKKTSEHPPDRDRKKDVPPPRMQFDNVHRVEKTKKHSLVNQVEAQNRVELFRHLPQYVHGTQLPDLESKFFHLDLMHPSVYKVGLQFLSGVISGGNACCVAMLLAFREAIKDYSTPSTKTLNRDLTAKISSYVSFLIECKPLSISMGNAIRFLKNRIAKLLLTLSESEAKASLQSDIDRFINEKIIIADHVIVSHAIAKVRDDDVLLTYASSSVVEMIFDHANELGKKFRVVVVDSRPNNEGQALLHRLVAKGISCTYTHINAISYIMHEVTRVFLGASSILSNGAVYSSVGTAAVAMVAHAFGVPVLVCCEAYKLHERVQLDSICSNELGDPDVISRVPEREDLCHLKNCTYNENLQLLNLKYDTMPSDYVSMIITEYGMLPPTSVPVIVREYRREHIWI

SEQ ID NO: 53943 - protein, 489 aa, Oryza sativa
MGKPVDVELGGAAGLEIAGGGGGGGGGVWAVAGAIGRAASFRCVFVLALSVGVLVSALLLIVPTRGHGFLSDDPVVLGAEIQVGFTLEKPVSFLAAHMDKLGGDIYEEIGIPNSKVSIVSMRSLTSKYSTNVVFSVLPSPKEASISLPALSVLRSSLIAMMLNQVNLSLTEPLFGHPSSVELLRFPGGITVIPEQSGSVWADPLFNFVLNNSIYQILGNITELKDQLKLGLNLRSYEKVYLQFRNEIGSSVDAPATIEASVLDGSSILLPYRLKQLAQLIKEPNARNLGLNHSVFGKVKGVQLSSYLQHSISDLSPSPSPSPSPSPSPSPSPSPFPSSSVPPSFSPSGSIHYPAPPTYMNPSLPPQASPPLPDTNPCFPCFNCDRFSSAGSPTGKPPCFRRDPKLPPFIHSPQPSVAPSPYLSPAFPPIPGHVDPPNHLPGAVPGPTYQMMSIPSPSLPVFRPSMAPWKKRRKTKSPPSIAPSPYSLHS

SEQ ID NO: 53944 - protein, 617 aa, Oryza sativa
MGGAHSREDLDLTSSDDEDDDEEYDAQTATSAASREDILRTSTPSSLEFLDAKLKALDLKYQAPNAAKLYLHVGGASASARWVPAERRATYAFVDKATAAGDSDCGGPRWVLEVGPGPRVSAPVGPALQLKALPAQRRADFAAGGSVWALRLPTDAAFRRFRQEYDRCLFENTYGVEATDEGRKEVFGANFAAWARPGESDDAVWADAEDSFTPPVATPARDLLEEFEEEAGDGSIQSLALGALDNSFLVGGSGIQVVKNFRHGVHGKGVSVRISDGRGGGNAYMTPQKALLMRGETNMLLMSPGETGTRHSNGVHHVDIETGKVVAQWRFEKDGTDITMRDIANDSKGAQLEPSGSTFLGLDDNRLCRWDMRDSRGRVQTIGSSSESPVLQWSQGHQFSRGTNFQCFASTGDGSIVVGSVDGKIRLYSKSSMRMAKTAFPGLGSPITHVDVTYDGKWILGTTDTYLILICTIFKDKDGKEKTGFSGRMGNRIAAPRLLKLSPLDSILAGSENKFHGGQFSWVTENGKQEKHLVATVGKFSVIWNFQQVKDSNHECYRDQEGLKSCYCYKVVLKDESIVDSRFMHEKFATTDSPEAPLVVATPMKVSSFSLANRRLH

SEQ ID NO: 53945 - protein, 62 aa, Oryza sativa
MIIGSGFSIRRQMLANIQRFICSIWSTKPPRHHRHTACHVDFDYKSTSPSRPYCSVWCRCSC

SEQ ID NO: 53946 - protein, 832 aa, Oryza sativa
MSTTENSNGIDHKEKLSYSTLFALLPLLLPLLLKLLQYVHSLWTDEVASNVSEKLEGAKFIIQAEKPFGIIEETTEMLDMNEEELLENEIRKWLKKIRQTGYNVIGMCVCLEGAFYKLLDNISVCGALLKDLEVMEFRHLTMLIKHTIVPLVKNCPAELWPKWIDMILQPVFHYCDDTLDGSWCSFLYKETMLVPDKFCHISFTEEKIEELGKDHLFEVTREISYMLAVMALPELNGGIANEHQSIVSIVETSADLESTCSSSLVGYLLYHDDLRPSILRLINNIIGYWKDSEARIKVVSFCHMLIQLAISTHNDKLISFVQDNLIPMVVRCLIFEPISNNNDLLLLCEDAYRCIQREESVSEGQHDGNSAEIFENWLSKQMIVAHYEHSPPDELEDFVCIWEIEEEFTAYLHTYTEMLHKVDGIGDTIEDVYLRCPIPFVSKHDNNCCPISNSWAMSSMLSRKITSMYCKRETEQKFKFLCKLITFKPYIKCSGYDESVQELVDDDSEVWSALPGCCRQETLELFCRILDPWEPQFHPLIREDDKEMLREIAYLLTSREDIHCVQSFQPVSSDFLLHLQPYAQNYIEVKNASSGYDRVKEQIRLHEAFDTHLASGALDDHVRQISSSKDNFVKIMLDDDTLHSQFIDLDYDLLKLSHERRAKLLSKQDQLCLYYKHMKCAVVNLQHRDRLESLICELESEGFFRVDDDSIEWEKEHFSELVDEFNEHIFAGIHLPKYYVIRGVMDYREMLHMKDSTWDDAFTVVVGGAFCRWMEDRDLFWMETRYYRHRYYDIIQEPVKMIWRTTGDENEMTVGHTTRIIDGNGEFTAGMN

SEQ ID NO: 53947 - protein, 1180 aa, Oryza sativa
MAPADGGGEQPHKAHRQHKSGAKARKKKGKGKGGGGDDDGGERKNPKAFAFQSAAKAKRLQARSAEIEQRRLHVPIMDRSIGEPPPFVVVVQGPPQVGKSLLIKCLVKHYTKQNLSEVRGPITVVSGKSRRVQFLECPNDINGMIDAAKIADLALLLIDGSYGFEMDTFEFLNIMQVHGFPKVMGVLTHLDKFKDVKKLRKTKQRLKHRFWAEIKEGAKLFYLSGLIHGKYTKREVHNLARFISVIKPIPLSWRMAHPYLLVDRFEDVTPPESVRLNRKCDRKITLYGYLRGCNMKRGTKVHITGAGDFSLSGVTSLADPCPLPSAAKKRGLRDKEKLFYAPMSGLGDLLYDTDAVYININPHLVQFSKTGENDASKKQGKGQDVGVTLVKTLQNPRYSLNEKLDQSFINLFGRKPAAQSEDISGNQNDQGDANILEEADGNNICNANTLESNDHSYSECSSDSEHDNDEATQQNDHEVGLREEVEFCNGRMRRKAVSANFKDDDDDEGAEEDDVDSENSGDDQLSEGSADDSEESLDSDDETENNSKWKESLLARTLSRRSANLMQLVYGQASKKLDEGNDSSAEESSDEEFFVPKGQKKQAKNESTSFDDMDAEDYSKFFKTELRDWSDEDLIKSIRDRFVTGNWSKAALRGQEINENDVDDEEVDGDFEDLETGEVHTSKAYENTSGNGGTHKQDDLAMEERRLKKLALKAKFDAEYDGSDLSGEEVDNDTKKSKREETNGGGYFDKLKEEIEIRKQMNISELNDLDEDTRVEIEGFRTGSYIRLEVHGVLFELVEYFDPCHPILVGGIGLGEENTGYMQASLKRHRWHRKVLKTKDPIIVSIGWRRFQTTPVYAIEDRNGRHRMLKYTPEHMHCFAMFWGPLAPPKSGVLAVQHLSNSQVPFRITATGFVQEFNNTARIMKKIKLTGVPCKIFKKTALVKGMFTSDLEVARFEGATIRTVSGIRGQVKKAAKIEPGDMPRRKGESIDGIARCTFEDRILMSDIVFMRAWVNVEVPTYCNLVTTALQPQDETWQGMRTTAELRRAHNIPIPHNTDSVYKPIERKVRKFNPIEIPAKLQHLLPFKSKPKDTPKHRKTPVENRVPVLMQPSEKKTHAAIQQLRLLKHEKARKKKLQDEKKKKAYEAEKAKSELLTKKRQREERRVRYREEDKQKKRARR

SEQ ID NO: 53948 - protein, 503 aa, Oryza sativa
MGYTYTPTYYSGLHDAIASLCKSILPFGGFRSGRRLTADQAAARRHADALKWQQESFRRILHLSALHREGIVPPSDVDAFRADMLATLAAAPPPPAHPDQPAILRDKLLFLQELLYAKCISAAEYNSTKSPLVQRLAAFGVVVDCPDADVGDGGAASAAAPASSSSMEEWSEIDLRDPPPAAAASDKPKHKAFVPPWKSRGKKELDASRPPLAPVDQNNSKNAPSVLMAESSPSEAMPTAKTDKGKRRHLTAMFHNGGNGSENKEPPAASMEGTDQEKDASKSKKKSSWGFDGLKKWKKASNDEATAGGERPEHAAPRSSYSECRLEASPAVAKDAKRAKKKLNTATGDDDSASDLANDKVLVENTKKELSRIQAELSSTNRNLNFSDQQIEAISTRLPVDKSDLKTFFPKAWCDEHGDNVINVAKKEFKEHVEEMEKQRDITGGGDGWVAFGDSHDENFNPRAFSQHQAAVKGNVHDSLSSSQHFTNPFYDEKNPFLTPSYD

SEQ ID NO: 53949 - protein, 203 aa, Oryza sativa
MATSSPPCACAAPLLRRRLLPAPPRAPSPAAPPRLRLPLRRSPPPARAKFGKFEASDAAPTEASAEEAESAAAAGDGAAEQKAEEDDRSGSLPPLAELVNNRRIVMRLYVCYLALCVSAACRRTWRARYGNRGRRAPISSTLVACEPLYVAHCSSAVLTVLHCFSLTLPVTKVVLFSPGSWNGMESLHVCMSVSKMLNVLILF

SEQ ID NO: 53950 - protein, 39 aa, Oryza sativa
MLVSLQFTCEGDMKSGMSNSCGFASFSGHTYFHPFCSKQ

SEQ ID NO: 53951 - protein, 380 aa, Oryza sativa; identical to SEQ ID NO: 37626

SEQ ID NO: 53952 - protein, 610 aa, Oryza sativa
MSMAAERVEAAGGGDDDYTQDGTVDLHGNPVLRSKRGGWKACGFVVVYEVFERMAYYGISSNLVLYLTTKLHQGTVSSANNVTNWVGTIWMTPILGAYIADAHLGRYRTFMIASLIYLIGMSLLTLAVSVPSLKPPKCGAGTADPGCSEKASSLQLGVFFLALYILAVGTGGTKPNISTIGADQFDDHHPRERRHKLSFFNWWMFSIFFGTLFANTVLVYLQDNVGWTVGYALPTLGLAVSIAIFTAGTPFYRHKPTSGSSFARMARVIVAAIRKLAVALPDDARELHELDDEYYAKKKTTPLPYTPYLKILSKAAVKTSTTSRWSLSTVTQVEETKQILKMLPVLAVTFVPAAMMAQVNTLFVKQGTTLDRRVGGGGFEIPPASLQAFVTISMLVSVVLYDRVFMPLMARATGNPRGITLLQRMGVGLVIHIAIMGIASVTERHRLAVAREHGIADSKGTTIPLTIFVLLPQFVLMGVADAFLEVAKIEFFYDQAPEGMKSLGTSYAMTSLGVGNFLSSLLLSTVAHVTRRHGGGGGWIQNNLNASRLDHYYAFFAVLNCVNLVFFFLVCRLYVYNAEVSRVVDVGGRGGGEGGEVLRPKEVAMVDTNL

SEQ ID NO: 53953 - protein, 428 aa, Oryza sativa
MSNSTWQPSPPQTPAAAASSASGIDGVENKISPSIVFIVAVLAIVFFVCGLLHLLVRHLLRLHRQRRAREDAESATAFEGQLQQLFHLHDAGVDQAFIDALPVFLYRNVVGVGGEDGKDPFDCAVCLCEFAADDQLRLLPKCSHAFHLECIDTWLLSHSTCPLCRRSLLAELSPTCTPVVMVLESESSRDMVHAADDEPADVGGEDAPGAEEVVEVKLGKFMCVEGNVFFNVNAIAGEGDRAGTSSNGNGDANAKAGGLGQRRCHSMGSYEYVMDAHASLRVSIKPPRKKPAAAASKSRRRGAMSECEFGASKRGESSLRLPPFRATPRKNPDDDAAAAAGAKLAKDSFSVSKIWMVPSKKEPGAAAERRAVSFRWPAAKDWDVEAGSCGGNSAVSSVAAEERPSFARRTLLWVVGGSRQLSRVGSCS

SEQ ID NO: 53954 - protein, 452 aa, Oryza sativa
MAVRLAACSSLCYAFRVFGIWEVDLLECIPTCWAMCFKLIGAVQEFDSKVQVLSFILVLLNYVGDDRIIPFVSELSQFFLKTWEESSGECLLQIELLDAIRTFISSLGYNSPLCYGMVLPILQYGMDVDSPNALNLLEDTVLLLEATLSNAPSIVPQLLDCFPYLVGIMNGSFNHLEIMIKIIEHYIVFAGSDLLQSHATSLESIVDTIVGNADDKGLLTTLPIIDLLVLMFPQEVPPLISSALQKLVFISLSGGDEHYPSRTAVCVTSAAILARLLLLNRDFLAQLLSEPALIARFQQAGINQNLLLLLVDWWINKVDNASSIEKKVYAMALSVILTANIPGVIEKLGDILRLCTSVIIGGHGRTTSDDSSDDTISSLPLSDDPEYSNTSKEFKKAQIRELDPIRKASLVDMLRENLKECAALHGDAVFNAAISRIDPLVIAQLWQALEIG

SEQ ID NO: 53955 - protein, 446 aa, Oryza sativa
MWIAEGFVEDRGTETTLEEVAEDYLKELTQRSLIQVVERNEFGRPRRFKLHNMVREITWMMSKRQRFALICDDPDVTSLGDAVRRVPVHKGGQHFQPSASWQQLRSFLLFDKHVSISWICNASSNFRLLRVLCLRYSLLKDFPNAIVGLFNLHYLDLSRTKVNKIPKSVARLKNLQTLHLRRTSVSELPCEITLLACLRHLSVSTDLYGTSFSGNVYGLRSLHTLKEIKASKNLVQNLSYLTQLRSLSITNVLANHNRDLWSSIGKLKFLTRLAVSSRDDDEVLDLENFRAPQYLEKFYLDAKLANNVLFPISGHFQNLKLLSMRFSHLVQDPLISLCKMANLVCLELNCAYDGEALRFCAEWFPKLKQLSLEKLENLKSIDIIDGTMVNLTYLKLSQLWNLHVVPIGLTYLKMLHHLFAESMPDVFIRGLAREGFLNNSIIIECV

SEQ ID NO: 53956 - protein, 1279 aa, Oryza sativa
MDAADEMDIDAAADETGSQPSASGSLSTFLSELAALHRRSSGTSSSSSTSTSPPLSLASLTFLSSAASPSSSIFPRLAAAGLPASSLSAPLAASLSSAHHPLPAAVAYLRLLLAPASPLLSLFSPLPFLSLLLALRKSASSSAASHDAAAAANPSSGSGSGSGSGKGNHRNRKRKSHQQRQSPAAAPSLLPRTLALLADAAGRLPLGEHPDARRSLVDTAAELAAFDVLVAVLGSGYYAEAMPDLVRALAPVALSGSRSAARASAVEFLARKVVPLGVEGGEDGVRKAVGYLPRYLAAKAPEKSEARAMAVEAIVEVVRAMGQLEMEGFAGYVVAMAKGKAKGRLLAVDLILAMLPLLLPSEGDDCGLQEGSWGLKFVRVLVERCSDTVGGVRARALTNAAQALDVLSERGMEVDRLQEVMRIGNIGLGELLRLRCADDKAAVRKAALVLITKSIRLIGRPVDESLLSAMGAACSDPLVSIRKAALAAISEVFRNFPDERVTKEWLQAVPPLVIDSETSIQEECENLFLELVLNRVCQAANLNLNDDSNDMEEVFPKGTLDLLKSICDGEVAPCIKKICASLGKKKKLKPLLASSLQNIITISESLWLRGCKPIEMWTAPAGAWWLLSEVSSFAPKSVNWKFLSHHWKLLDNVGQDKGKVRPKGEPNSALWAVDRVSLLQTISNVSMELPVEPAAELAHSLLTRIENFDMNLSEVDAHVKSLKTLCKRKAKTAKEGETLILKWVQQLICKAVNILDEYIKETSEAAKGPKFFTPLSGKLKGRKDASAQKSMSHAVIAVFTIGSLILACPTANVQGVIPSLHTIITSGNSQPRPKNLAGGTVSFKELAPSLYIQSWDTMAKICLVDDKLAKRYIPLFVQELERSDLATLRNNIMIALADFYVRYTAMVDCYMSKITKSLRDPCEVVRRQTFILLSKLLQRDYVKWRGVLFLRFLPSLVDESEKIRHLADFLFGNILKAKAPLLAYNSFIEAIYVLNNCLGNGAQTESQGRLDGGPTLFAIRGTDERSRSKRMHIYVSLLKQMAPEHLLATSAKLCAEILAAACDGLLNVDDAAGRAVLQDALQLLACKEMRIHPNICTDNSEMDEECGDGGSSNATLQAAKGRAVTQVAKKNLIQIAIPIFIELKRLLESKNSPLTGCLMECLRTLLKDYKNEFDEILVADKQLQKELLYDMQKLDVAGKGKAKAAAAAEAGPSGGLAGGERWRQEGGGRLGEGHGEVGAQGGEPEHADAAAELDERAQGEVHAGRRLAPARCAGVGPAA

SEQ ID NO: 53957 - protein, 249 aa, Oryza sativa; identical to SEQ ID NO: 32577

SEQ ID NO: 53958 - protein, 956 aa, Oryza sativa
MAADAIITETGALHVAGVPLVNPSTVVVWEVMPGLGNGIQATAKINATSSLPPSLNPPLWAGFAPLASYLFSLQDYLVSEGAQTKKQAQVDNETTEVASIHCCPVSNFSAYVSPEAAAQSATTTTWGSGVTSVAFDPTRGGSVITVVIVEGQYMSPYDPDEGPSITGWRVQCWESSVQPVVLHPIFGSPANFGGQPPTQTVWSTRVNKSIPPSEDLKNPQSYVPMPTTSDERSSSECSVDRANRLSFDPYDLPNDVRQLAQIVYSAHGGEVAVAFLRGGVHIFSGPNFEQVDSYHVNVGSAIAPPAFSSSGCCLASVWHDTLKDRTILKIIRVLPPAILNAQTKVSSAVWERAIADRFWWSLLAGVDWWDAVGCTQSAAEDGIVSLNSVIAMLDADFHCLPTIQQRQQHCPNLDRIKCRLLEGTNAQDVRALVLDMQARLLLDMLGKGIESALINPSTLLPEPWQASSDMLSSIGPDKMTVDPALLLSIQGYVDAVLDLASHFITRLRRYASFCRTLASHAVGASSGSGNSRNMVTSPTNSSPSPSTNQGNQGGVASTTGSSQMQEWVQGAIAKISNNTDGAANAAPNPISGRSSFMPISINTGTFPGTPAVRLIGDCHFLHRLCQLLLFCLLFRRRQSPRIPANAQKSSDSSMQKQHLMNSKTEDNTLAVRSGLGAAKLEDGTTSRGQMVGAKGAEENPVGNKSARIGSGNAGQGYTSDEVKVLFLILVDLCKRTATMQHPLPSSQVGSSNIIIRLHYIDGNYTVLPEVVEASLGPHMQNMPRPRGADAAGLLLRELELQPPAEEWHRRNMFGGPWSEPDDLGPLDNTRQLKINGSTNRHLSDMEEDGDSSFGIQNLWPRKRRLSERDAAFGLKTSVGLGSFLGVMGSRRDVITAVWKTGLEGEWYKCIRCLRQTCAFAQPGALAPNTSNELEAWWISRWTHACPMCGGTWVKVV

SEQ ID NO: 53959 - protein, 318 aa, Oryza sativa
MTRRCSHCSHNGHNSRTCPNRGVKIFGVRLTDGSIRKSASMGNLSLLSSAAGSTSGGASPADGPDAAPTAADGYASDDFVQGSSSATRDRKKGVPWTEEEHRRFLLGLQKLGKGDWRGISRNFVVSRTPTQVASHAQKYFIRQSNMTRRKRRSSLFDMVPDESMDLPPLPGGQEPETQVLNQPALPPPREEEEVDSMESDTSAVAESSSASAIMPDNLQSTYPVIVPAYFSPFLQFSVPFWQNQKDEDGPVQETHEIVKPVPVHSKSPINVDELVGMSKLSIGESNQETVSTSLSLNLVGGQNRQSAFHANPPTRAQA

SEQ ID NO: 53960 - protein, 481 aa, Oryza sativa
MNCGPPDQLPPATAPSCFLNLNWDQSMDAAAGGHLDPALSSMVSSPASNSTGALHGISPQPHYGGGTPLSSPPKLNLSMMGQFHHYAAPPQVGGGGGGGGGLPILENLMPMGHLDQFLADPGFAERAARLSGFDARGGGGGGGYGGAGPAQFGLPDAGAAGASKEMELGNTRDESSVSDPAPGGAEIPPKGASDGNARKRKASGKGKGKDSPMSTSAAKEDSSGKRCKSTEESNAAAEENSGKGKAAQSNSENGGGKKQGKDSSSKPPEPPKDYIHVRARRGEATDSHSLAERVRREKISQRMKLLQDLVPGCNKVVGKAVMLDEIINYVQSLQRQVEFLSMKLATVNPQLDFNNLPNLLAKDMHQSCSPLQSSHFPLETSGAPLPYINQPQQGNPLGCGLTNGMDNQGSMHPLDPAFCRPMGSHHPFLNGVSDAASQVGAFWQDDLQSVVQMDMGQSQEIATSSNSYNGSLQTVHMKMEL

SEQ ID NO: 53961 - protein, 476 aa, Oryza sativa
MDGRKDVGILAMDIYFPPTCVLQESLEAHDGASKGKYTIGLGQDCMAFCSEVEDVISMSMTVVTSLLKKYKVDPKLIGRLEVGSETVIDKSKSIKTWLMQIFEECGNTDIEGVDSSNACYGGTAALLNCVNWVESNSWDGRYGLVVCTDSAVYAEGPARPTGGAAAIAMLIGPNAPIAFESKYKASHMAHVYDFYKPDLASEYPVVDGKLSQTCYLMALDSCYRQFCKKYEKLAGKQFSISDADYFVFHSPYNKLVQKSFARLHYNDFTRDCSSVDNDAKEKLQPFSNLTGEESYQSRDLEKASQQVAKPLYDIKVQPSTLLPKQIGNMYTASLYAALASVLYNKHASLDDQRIVMFSYGSGLTSTMFSLKLNNGQDPFSLSNIASVLNATEKLESRHMTLPEKFVETLKLMEHRYGAKDFETCKDTSLLPPGTFYLTRVDSMYRRFYERKADEEIAAAKAKYSNGHATNGYANGH

SEQ ID NO: 53962 - protein, 528 aa, Oryza sativa
MGRRLLLLFLMLAQAPNSNGDSKIKNVVVLALENRSFDHMLGWMQRLLGLPIDGLTGAECNPAPGPGPADSLLHCVSPDADLVVPDDPAHAFEDVLEQLLGFRPNDSTGAAASPSDMSGFVRSAVSVSALLTDAVMRGFTPSRLPAFSALASSFAVFDRWFSSIPGPTQPNRLFLYSATSHGAVAHGKWNLLRGYPQRTIFDSLAADALDYRVYFKTIPTTLFYRRLRTVANAARGTFRRYDAAFRDHARRGLLPALSVIEPRYFDLTGTPADDDHPAHDVANGQRLVKDVYEALRAGPQWNHTLLIITYDEHGGFYDHVPPPNVGVPSPDAIRGPLPFFFRFDRLGVRVPTIMVSPWIRKGTVVGRPPGGPTPTSEYEHSSIPATIKKIFNLSSDFLTRRDAWAGTFEHLFTDLDEPRTDCPETLPEIPPPSSSSSSTKKEDGGWLSDFQRELVQLAAFLNGDYMLSSFAQEYESRMTMTVKQADAYVRRAVKSFLEASKRAKRLGANDSAIVTMRPSLTTATTCCP

SEQ ID NO: 53963 - protein, 583 aa, Oryza sativa
MGSSSGLVDWRGRPVDTKKHGGVRASIFIHAMVLLTNAPNIANMMNMVSYLRGTMHMGVAQASTTASNYFAALQMFSIPAAFLADSYLKRFYTVLLFAPIEIIGYILLAVQAYTTSLHPPPCSPAATAASATTTCEPVRGANLSLLLLGLYLIPIGDGAARACLPALGGDQFDLGDPDEQRQETSFYNWYTFAVSTGGFVGLVFIVWVQNSKGWGVGFAVSAAFVALGLLVWAAAFPLYRNQLPMGSPITRVLQVFVAAFKKRNVRLPENPSELKQINQDDDANAHEVLPKTDGFRCLEKAAVETGNDAGPWSLCSVTQVEETKIVLRMAPIFVAAVLSYIPVPLLLSLTVQQGNTMDTRLGAVHISPATLFLIPTVFQMVILIIYDRAIVPPLRRLTGYVGGVTHLQRIGIGFVATIVATAIAAVVETRRKMTAEESGLEDATTGIPLSVFWLTPQFFLIGIVDVTSFVGLLEFFCSEASMGMKSIGSSIFYCILGVSAWLGSLLIQVTNRVTQRTNGGGWLDGANLNKGKLDRFYVVLCIIEVVALVIYVFFARRYVYRNDQRVVAQEQRKGDTGNGMAVI

SEQ ID NO: 53964 - protein, 716 aa, Oryza sativa
MVVNSRPLKRARTRVEARDFAGFPPAGDGGAAGTFREAVRGFLARYARLLPLPSIFSPAAAAAPPHLLTWRVSLRVGEEGDEEGGGGAVELNVVEEDVLRSRSVYCDQCRVVGWSGHPVCGKRYHFIIENDNNQVCGKRHSCCLRCGTPTVAGESRCLLCNFDMDGEELEECGYMHLDDNTHLLHAVVHANGYGHLLRVNGREGGSRCLTGRDIMSFWDRLCKVLHVRKVTVMDISKKHGMEYRLLHAITSGHPWYGEWGYKFGAGSFALTSDTYQEAVDTLSGIQLALYFSHRQPIRTPLQNTIALYWALSDRQLVTVRDLFRFIMHLLHQARKKNETSKPTTDEHKEVASNVLCKWTKEDIDRAETAMLKVLRVVQPGQWVSWRALRGAASKAVDSQELLDYSLRGLGGKLMDDGHFIAVRCNAETSAIEYRLEDNSNQSVDAAAFGPSVDHLLHDLKFLYNALLNPETMLASQPEVIGASSHSAAAKILDCKQFIKHYDQHTPRAPLNPFLLSVRCSIELLDHPKDYTAPPVELVLLPASATLAELKIQATRAFQETYLMFQSYQVEQLPDFPNFSDTTLVKHVLGSSQLVRVRGRCTGDNRRIVQFRMERGLENWTVDCTCGAKDDDGERMLACDVCGVWQHTRCSGISDFDDVPEKFICRKCASPRRGKGRGGGGGNGGSRMDVSAAGRCKDEIGSSVGGAGKFGRMATVG

SEQ ID NO: 53965 - protein, 605 aa, Oryza sativa
MTQEPTSLLPVWARAPTRRPKTTRRHPLHLHEAAMEEEGADHRPPSSSSGGRGFLSGLCAAALRRKPISAHAAHAASGEGLVRQLGVFELVLLGIGASIGAGIFVVTGTVARDAGPGVTISFVLAGAACVLNALCYAELASRFPAVVGGAYLYTYAAFNELTAFLVFTQLMLDYHIGAASIARSLASYFVQFLELIPFLKGHIPTWIGHGEEFFGGVVSVNILAPILLIILTTILCYGVKESSAVNTLMTTLKIVIVIVVVFAGVFEVDVSNWSPFMPNGFKSVVTGATVVFFAYVGFDAVANSAEEAKKPQRDLPIGILGSLLACVLLYVAVCLGITGMVPYTLLGEDAPLAEAFAAKGLKFVTVLISIGAVAGLTTTLLVGLYVQSRLYLGLGRDGLLPSIFAKVHPTRHTPLHSQIWVGCVAAVLAGLFNVHELSHILSVGTLTGYSVVSACVITLRWNDKTTSCHSLGNMSIWQEGVLCLVIIALCGFVAGMCYRFSYAIAFMIIALLIAVAAGFALQFRQVYVDPPGFSCPGVPIVPMVSVFFNMLLFAQLHEEAWYRFVILSLLAVGVYAGYGQYHAVPSSSDHPHPAVAYHGIPSEAP

SEQ ID NO: 53966 - protein, 579 aa, Oryza sativa
MAVAAALLRRRALYSALASPSWLHDTSSCYICSISGTHSLVNHPNLRLQRGYHNSGKFDLTDLTHPHIWYPNAREKKRNVFLHVGPTNSGKTHNALKRLEASSSGVYCGPLRLLAREVGQRLNKANVPCNLITGQEREEIEGAKHSSVTVEMADMTTEYQCAVIDEIQMVGCRSRGFSFTRALLGLCSDELHVCGDPAVVPLIQRILEPTGDVVTVQYYERLSPLVPLKTTLGSFSNIKAGDCVVTFSRRSIYMLKRRIEMGGKHLCSVVYGSLPPETRTKQATMFNDQDSNLNVLVASDAIGMGLNLNISRIIFSTLEKFDGICNRELTVAEIKQIAGRAGRYGSKFPVGEVTCLNSDHLPLLHSALKSPSPIIERARLFPTFDVLSLYSRLHGTDFFQPILERFLDKAKLSPDYFIADCEDMLKVAAIVDELPLGLYDKYLFCLSPVDIRDDISTKGLIQFAENYAKKGIVRLKEIFTPGTLQVPKSHNQLKELESIHKVLELYVWLSFRLEDSYPDRELAASQKSICSMLIEEYLERSGWQQNGRKDFLQKPKRLHQEYDASQLRKYFQEIDVRSK

SEQ ID NO: 53967 - protein, 639 aa, Oryza sativa
MDSTPAPAAAAAETPTTAPAFEECLRLLRGERDEQKLAGLLVAANLCRAGDAASVVEVYRAVGPRFLRRLLNTGLGKVEGGKEEDREAYLRLSVTVLSGLARFPEVAADEGVVSTVPLIAEIVSKSSDLAITEECFELLSLIAIASDGGAHTFCEPGVMDMLFLQISNFPDGSRCLELAIHLMQLLVHKIRIDNMTVEKLQGMTSMVTSLARLFAVLHTTVKFEALHMLTALLSQKESPLHDALRSVPSMIWKCQIRVGITAVLQNRVVSSEKLQALLLAECMMSILGENWLSEEYKVPDDQNMMPVDKFVLLVLESARIEVSVLLNELAYLKYESSKNSQRDDAISQKERNLAILFSLIERIIKMISNASSGEGAVCQTIRESTIMKAITGLNETVGLVLDFLQDAKDHGQRKGDDLLAAVRIVGSYLAEAPYACKEKIRHLLEFIFSVEGQDESSSFHSICFMLPMLSQITMEADGCRILASFGGYKMVIDCLIKMIEQNGMMIDTGNMFLACDTIINFLSNMKNAHIQMGSCFVGLLKALVSWTGTADDSSVIITASCLCTLVLDLTTEEFLLSSSDFDSKTLEKLSKLIARSLHQGIPDDDIEQSNQKQIILSGYRRWSDRYPRVKNILQQHVSV

SEQ ID NO: 53968 - protein, 392 aa, Oryza sativa
MASLADSFLADLDELSDNEAYPEEENAEAVGTEEIGDDDMPDLESLNYDDLDSVSKLQKTQRYNDIMQKVENALQKGTDLSNQRSILEEDPEYQLIVDCNALSVDIENEIIIIHNFIRDKYRLKFPELESLVHHPIDYARVVQKIGNEMDLTLVDLEGLLPSAIIMVISVTASTTSGKPLSEENLVKTIEACERALTLDAAKKKVLEFVESRMGYIAPNLSAIVGSAVASKLMGTAGGLGALAKMPACNVQLLGAKRKNLAGFSTATSQFRVGYLEQTDVFQSTPPALRTRACRLIAAKSTLAARIDSIRGDPTGKAGRNLLEEIRKKIEKWQEPPPAKLPKPLPVPDFEPKKKRGGRRLRKMKERYAQTDMMKLANRMQFGVPEESSLVMV

SEQ ID NO: 53969 - protein, 32 aa, Oryza sativa
MMRSTLRFEQISICGDCWYDINHKICFDCIVK

SEQ ID NO: 53970 - protein, 617 aa, Oryza sativa; identical to SEQ ID NO: 52855

SEQ ID NO: 53971 - protein, 293 aa, Oryza sativa
MAVNLVLSFALAILISSSPTAVGVDATEELKEAVLTLDAGNFSEVVAKHPFIVVKFYAPWCGHCKQLAPEYEKAASILRKNELPVVLAKVDAYNERNKELKDKYGVYSYPTIKIMKNGGSDVRGYGGPREADGIVEYLKRQVGPASLKLESAEEAAHSVVDKGVILVGVFPEFAGMEYENFMVVAEKMRADYDFFHTSDASILPRGDQSVKGPIVRLFKPFDELFVDSEDFGKDALEKFIEVSGFPMVVTYDADPTNHKFLERYYSTPSSKVSKHNSCYILFVSSKYIVNYTC

SEQ ID NO: 53972 - protein, 108 aa, Oryza sativa
MILVSSTVLYASILKQLKHIKRQRKHILKQGRTYQLSLVESNWLSNINKLQCGKELPTVRIISMGVTTQSKGKVIINLKEITFLIGMKSLPDRGRSRRQMLGMLALRK

SEQ ID NO: 53973 - protein, 644 aa, Oryza sativa
MMGGGLVMDQGMMFPGVHNFVDLLQQNGGDKNLGFGALVPQTSSGEQCVMGEGDLVDPPPESFPDAGEDDSDDDVEDIEELERRMWRDRMKLKRLKELQLSRGKDPAGGVVGDPSKPRQSQEQARRKKMSRAQDGILKYMLKMMEVCRAQGFVYGIIPEKGKPVSGASDNLRGWWKEKVRFDRNGPAAIAKYQADNAVPGFESELASGTGSPHSLQELQDTTLGSLLSALMQHCDPPQRRYPLEKGVPPPWWPTGDEEWWPELGIPKDQGPPPYKKPHDLKKAWKVSVLTAVIKHMSPDIEKIRRLVRQSKCLQDKMTAKEISTWLAVVKQEEELYLKLNPGARPPAPTGGITSAISFNASSSEYDVDVVDDCKGDEAGNQKAVVVANPTAFNLGAAMLNDKFLMPASMKEEATDVEFIQKRSASGAEPELMLNNRVYTCHNVQCPHSDYGYGFLDRNARNSHQYTCKYNDPLQQSTENKPSPPAIFPATYNTPNQALNNLDFGLPMDGQRSITELMNMYDNNFVANKNLSNDNATIMERPNAVNPRIQIEEGFFGQGSGIGGSNGGVFEDVNGMMQQPQQTTPAQQQFFIRDDTPFGNQMGDINGASEFRFGSGFNMSGAVEYPGAMQGQQKNDGASEFEELE

SEQ ID NO: 53974 - protein, 510 aa, Oryza sativa
MGGFEDDEPPSKRARASSAEPASLLDSFSCLKPAAPLGSTMARPLPSQGKEVMVGSKGVIKRDEFVRIITKALYSLGYEKSGAVLEEESGITLHSPTVNLFRRQVLDGNWDSAVVTLKKVGLLDENIVKSAIFLILEQKFLELLRNDNVMGAIRTLQSEITPLGVNKKRVHELSGCIISSPQHVLLGFSKLGIESSNSRLKLLEELQKVLPPTVMVPERRLENLLEQALTVQREACYFHNSIDGLSLYTDHHCGKDQLPSCTVQVLRAHRDEVWFLQFSNNGKYLASASNDKSAIIWKVDEDGELLLKHTLTGHDKPVMMVAWSPDDCQLLTCGMEEVIRCWDVESGKCLHVYEKSGIGLISCGWFPDGKHILSGLTDHNFCLWDLDGKEVDCWKGQRSSKTSDFAVSNDGKLIISMNRESTIRLFDRETKQERLIEEDNTITSFSLSEDGDFLLVNLISEAIHLWNIRNCPIRVNRYAGHKRSRFVIRSCFGGSEQAFIASGSEDSQVW

SEQ ID NO: 53975 - protein, 325 aa, Oryza sativa
MAAAILAMVPSYISRSVAGSYDNEAVAIFALIFTFYLYVKTLNTGSLFYATLNALSYFYMVCSWGGYTFIINLIPIHVLLCIVTGRYSSRLYIAYAPLVILGTLLAALVPVVGFNAVMTSEHFASFLVFIILHVVALVYYIKGLLTPRLFKVAMTLVITVGLAVCFAVIAILIALVASSPTKGWSGRSLSLLDPTYASKYIPIIASVSEHQPPTWPSYFMDINVLAFLIPAGIISCFLPLSDASSFVVLYLVTAVYFSGVMVRLMLVLAPAACILSGIALSEAFDVLTRSVKYQLSKLFDDSPAASGDSSAESSSASTVSTNSKK

SEQ ID NO: 53976 - protein, 671 aa, Oryza sativa
MHMMTSASGCAKLDYLSSQEPGDESQINAIDIVDRLLVEDDIETYQQISIDQTTRAKSASTLGSDIAQCLAKRARCSSPLKKAGNFDWVDTPTVDDCRTSIISMENTVDRANNQVKHGGCGSSTRAWPILECIDEDLGTNCLKKTEPFCGTDDLYQEYDIGPNTQMAAEAMEALFNASTVSYDVKENERPEDSVVKNMTKGTKVDKTCAVHSPIQKRKVNFLRHRSGVATEYKQIKVDDTVRENGESSVSHTNTSQTRKYTKQMAGKAKRNISSGITQRDIDHEVSEVITRSGTNDSNIPLSLDTDALIHPKRRRTYIFTSGSSKIEFIEAIKPTALRAKTTEVKQLSTANTVSVSDQDTTSGLRMSQHSSFADHEASAGSSYFNPLAETFTVGLEKQSIPEKKGHDSSLMPSVPLRELNGAGPQARTRTSETPKRVLKSPGSRELANLFRNEVSPVLQSSRRRRKHMSTVRVLLSQSMGNETLNDQTKILIHFGLSVATTISEATHFVAEKFARTRNMLEAIATGIPVVTPAWLECCREARSFIDEKRYILRDIKKEKELGFSMPVSLSRACKKPLLEGRRVLITPNAKPSKELLKSLVVTAHGKVLERNAMSKMKNRSLMGAFVISCEQDYKICVPFIKNGFEVFESELVLNGIVTQKLEFERYRLFSG

SEQ ID NO: 53977 - protein, 289 aa, Oryza sativa
MSSGGELALRQEYVIGDEIGRGRFGTVRRCYAVATGEAFAVKSTPKAPLREAEAADALDLALAEQEPKVHLVASAPGPGASPHVVALHAAFEDDAAVHLVVDLCAGGDLLSLVSSRGRLPEHEAADLVAQLASALASCHRRGVAHRDVKPDNLLFDGGGVLKLGDFGSAGWFGDGRPMTGLVGTPYYVAPEVVAGREYGEKVDVWSAGVVLYMMLSGTLPFYGATAAEVFQCVLRGNLRFPPRAFASVSPEAKDLMRRMLCKDVSRRFSADQVLRHPWIVSRGGAAVMG

SEQ ID NO: 53978 - protein, 891 aa, Oryza sativa
MRQTRSLAAAAAVLVVGVVLHWVGVVDAATAAERGILLEFKAAVTDPNGALASWTAGGDPCVDFAGVTCDPSSRAVQRLRVHGAGIAGKLTPSLARLASLESVSLFGNGLSGGIPSSFSALGPTLHKLNLSRNALSGEIPPFLGAFPWLRLLDLSYNAFSGEIPASLFDPCLRLRYVSLAHNALTGPVPTAITNCSRLAGFDFSYNRLSGELPDQLCAPPEISYISVRSNSLSGAIAGKLNACRSIDLLDVGSNHFAGPAPFGLLGLVNITYFNVSSNAFDGEIPNIATCGTKFSYFDASGNRLTGPVPESVANCRSLRVLDLGTNALAGDIPPSIGKLRSLSVLRLAGNAGIAGSIPAELGGIEMLVTLDLAGLALIGDIPVSLSQCQFLLELNLSGNQLQGVIPDTLNNLTYLKLLDLHRNHLVGGIPVTLAQLTNLDLLDLSENQLTGPIPSELGNLSNLTHFNVSYNGLSGMIPALPVLQSFGSSAFMGNPLLCGPPLNNLCGASRRAKQLAVSVIIVIVAAALILIGVCIVCAMNIKAYMRRSKEEQEGKEEDEVLESESTPMLASPGRQGSNAIIGKLVLFSKSLPSRYEDWEAGTKALLDKDCLVGGGSVGTVYKATFENGLSIAVKKLETLGRVRSQDEFEQEMGQLGNLSHPNLVAFQGYYWSSSTQLILSEFMVNGSLYDHLHGSPHTFSGSSSRVGLSWEQRFKVALGTARALAYLHHDCRPQVLHLNIKSSNIMLDKDFEAKLSDYGFGKLLPILGSYELSRLHAAIGYIAPELASPSLRYSDKSDVFSFGVVLLEIVTGRKPVESPGVATAVVLRDYVRAILEDGTVSDCFDRSMKGFVEAELVQVLKLGLVCTSNTPSARPNMAEVVQYLESVRTNS

SEQ ID NO: 53979 - protein, 390 aa, Oryza sativa
MEDLPDALIGEIVKRVSSTSDLSSLSLVSKRLYKIEAESRHTIHISCSLGPATDAIVSLCSRFHNLLKVDINYSGWTQDHGNQLDNHGLRILSSYCLSLSDITLSFCSYIDDTGLGYLVFCKKLITLRLNSATKITSSGLLAVAVGCKNLSALHLIDCNKISGAFEWLKYLGSDGSLEELKVKNCVGINQYSLLMFGPGWMKLQRFVFEFRNIYSIFESKDPSYVANCQYRYDFSCENLKQLSLRRIVTMEEIGLRSLLGKCKSLEKLCLHFVLGLTDSDMITLAQNCSNLRSISLQLEPVFCEGPEGRVCRTPLTDESLKALAGCRMLQVVELTMFGCDYAYPEIGFTQEGLMMFFQSCPIRDLVLCGANIFDDEGMKALSSAQFLQTL

SEQ ID NO: 53980 - protein, 679 aa, Oryza sativa
MHSQASAAAEKAVVAPYGSWESPISAAAVSAAGRTVEGLAVAGDGRLLWVETRPEEGGRAVLVKEAAEPGGDAVDVTPEGFAVRSLAQEYGGGAFAVQGDVVVFSNYSDQRLYKQTIGDNSAQPLTPDYTGSVLRYADGVFDPHFCRYVTIMEDHRKDSSNPVTTIAAVTISDRDANEPTVLVSGNDFYAFPRIDPIKRRMAWIEWSNPNMSWDKAQLWVGYFSEKGEVHNKICIAGGDPTLVESPTEPKWTSKGELFFITDRESGFWNIYKWDEESNLIVQLYSLDAEFSKPMWIFGVSSYGFLGKDDTSNKIVCCYRQNGRSCAGVLDHDSGSFSELDIPFSSVTNIVSGDGFFYVEGVSATLPVSIAKVTLDEKRKTATNFSIVWSSSEDVMQYASYFSLPEFMEFPTVVPGQKAYAYFYAPHNHIFQGSSDEKPPLLVRTHGGPTDEARGVLDLGVQYWTSRGWAFVDVNYGGSTGYGRKFRERLLGQWGVVDVNDCCSCATFLVETGRVDAQRLCVTGESAGGFTTLACLAFRQIFKAGSSLYGIADLASLRAGMHKFEAYYIDNLVGNRKAYFERSPINFVDRFSCPIILFQGLEDTVVSPVQATTIYKAIKDKGLPVALVEYEGEQHGFRKAENIKFTLEQQMVFFARLVGHFKVADGITPIKIDNFDEPSL

SEQ ID NO: 53981 - protein, 309 aa, Oryza sativa
MVKNAIQYAVVDAFAAEPFKGNPAAVCLLEGEDAAAAADERWMQSVAAEFNLSETAFLIRDPSSSAAAADAAPRFRLRWFTPVAEVNLCGHATLASAHFLFTTVLAKQQHAAAAMVEFVTRSGILTAKKVPAPPPPANDGGVPGEEKLFIELDFPMIDLVEYDSAETLSIPETLNGARVVSVWKSSTAGDLIVELSSGKEVADIIPNINEIKKCDGRGVIVTGPAPAGSDYDFFSRFFCPKFGIDEDPVCGSAHCVLAPYWGGKLGKQKLTAFQASPRSGTLYLELDGENRRVRIQGEAVTVMAGTLLA

SEQ ID NO: 53982 - protein, 1121 aa, Oryza sativa
MDSLWAAIAALFVAAAVVVRGAAAADDAQLLEEFRQAVPNQAALKGWSGGDGACRFPGAGCRNGRLTSLSLAGVPLNAEFRAVAATLLQLGSVEVLSLRGANVSGALSAAGGARCGSKLQALDLSGNAALRGSVADVAALASACGGLKTLNLSGDAVGAAKVGGGGGPGFAGLDSLDLSNNKITDDSDLRWMVDAGVGAVRWLDLALNRISGVPEFTNCSGLQYLDLSGNLIVGEVPGGALSDCRGLKVLNLSFNHLAGVFPPDIAGLTSLNALNLSNNNFSGELPGEAFAKLQQLTALSLSFNHFNGSIPDTVASLPELQQLDLSSNTFSGTIPSSLCQDPNSKLHLLYLQNNYLTGGIPDAVSNCTSLVSLDLSLNYINGSIPASLGDLGNLQDLILWQNELEGEIPASLSRIQGLEHLILDYNGLTGSIPPELAKCTKLNWISLASNRLSGPIPSWLGKLSYLAILKLSNNSFSGPIPPELGDCQSLVWLDLNSNQLNGSIPKELAKQSGKMNVGLIVGRPYVYLRNDELSSECRGKGSLLEFTSIRPDDLSRMPSKKLCNFTRMYVGSTEYTFNKNGSMIFLDLSYNQLDSAIPGELGDMFYLMIMNLGHNLLSGTIPSRLAEAKKLAVLDLSYNQLEGPIPNSFSALSLSEINLSNNQLNGTIPELGSLATFPKSQYENNTGLCGFPLPPCDHSSPRSSNDHQSHRRQASMASSIAMGLLFSLFCIIVIIIAIGSKRRRLKNEEASTSRDIYIDSRSHSATMNSDWRQNLSGTNLLSINLAAFEKPLQNLTLADLVEATNGFHIACQIGSGGFGDVYKAQLKDGKVVAIKKLIHVSGQGDREFTAEMETIGKIKHRNLVPLLGYCKAGEERLLVYDYMKFGSLEDVLHDRKKIGKKLNWEARRKIAVGAARGLAFLHHNCIPHIIHRDMKSSNVLIDEQLEARVSDFGMARLMSVVDTHLSVSTLAGTPGYVPPEYYQSFRCTTKGDVYSYGVVLLELLTGKPPTDSADFGEDNNLVGWVKQHTKLKITDVFDPELLKEDPSVELELLEHLKIACACLDDRPSRRPTMLKVMAMFKEIQAGSTVDSKTSSAAAGSIVEGGYGVLDMPLREAKEEKD

SEQ ID NO: 53983 - protein, 539 aa, Oryza sativa
MGGAYNLKLLAALSALVLLLAASRPFLPGLLEAALRAPVLPRDLLPLLPWPVAQPLLRRLALRGAADLLPSFVGVAREPGDGGARAAEWKGACFYDNRAWMEFHNGTDGGLGGGTLHLETNKAHSWTCIDLYVFATPYRVTWDYYFVGREHTLDFKEWESEAEYEYVKRKGVSIFLMPSGTIGTLRALWDVFPLFTNTQWGENSNLAFLKKHMGATFEERPKPWVSELNVDDIHSGDFLVLSKIRGRWGGFETLEKWVTGAYAGHTAVCLRDSEGKLWVGESGHENEQGEDIIAILPWEEWWDFEVKKDDSNPQIALLPLHPDLRAKFNETAAWEYAKSMDGKPYGYHNMIFSWIDTISDNYPPPLDAHVVASVMTMWNKLQPEYAANMWKEALNKRLGTKGLDLPEIIVESEKRGMTFDKLLTVPEQDKWVYTDGQSASCVAYVLMMYKEAGLFDPIASSIEVTEFTIKDAYSLNFFENNMTRLPVWCNKDDSVKLPFCQIKGRYRMELPGYNTMQPYPHMNERCPSLPPNYNRPRNC

SEQ ID NO: 53984 - protein, 442 aa, Oryza sativa; identical to SEQ ID NO: 50428

SEQ ID NO: 53985 - protein, 531 aa, Oryza sativa
MAMASHHLAQPPTRAALSSRPTYPLSSHHHSSRLQLPLVSGARRSRLSPAVATSPVAAPAMDAVADWGLTTLEEADPEVYDLVEREKRRQRAGVELIASENFTSLAVMEALGSPLTNKYSEGMPGSRYYGGNEVIDEVEELCRARALAAFHLDPEAWGVNVQPYSGSPANFAAYTGLLQPHERIMGLDLPSGGHLTHGYYTAGGKKISATSIYFESLPYKVSSETGYVDYDKLEEKAMDFRPKLIICGGSAYPRDWDYARFRAIADKCGAMLLCDMAHISGLVAAQEAANPFQYSDVVTTTTHKSLRGPRSGMIFYRKGLKPPKKGQPEGALYDYEDRINFAVFPSLQGGPHNHQIAALAVGLKQTMSPGFKSYIKQVKANAVALGNHLMSKGYKLVTDGTENHLVLWDLRPLGLTGNKVEKVCDLCSITLNKNAVFGDSSAMSPGGVRIGTPAMTSRGLVEEDFVQIAEFLHQAVTICLDVQKERGKLLKYFNEGLENNKDIEDLRAEVEKFATSFEMPGFRVSDMKYKD

SEQ ID NO: 53986 - protein, 403 aa, Oryza sativa
MAREILILRRLHHPNVVKLEGLVTSRMSCSLYLVFEYMEHDLAGLAASPDISFTEPQVKCYMHQLLSGLEHCHNNGVLHRDIKGSNLLLDNNGMLKIADFGLASLFDPNKNQPMTSRVVTLWYRPPELLLGSTDYGVGVDLWSAGCILAELLAGRPIMPGRTEVEQLHKIFKLCGSPTEEYWKKSKLPHATIFKPQQPYKRRISETYKDFPQSALRLIETLLAIDPADRLTATSALRSDFFTTEPYACEPSSLPAYPPSKEMDAKRRDEEARRLRAAGGRTNDGAKKTKTRDRPRAVPAPEANAELQINIDKRRLVTHANAKSKSEKFPPPHQDGAVSLVSTNHMDPLYEPQDPSSFSTVFTQEKSSVPTWSGPLADLSAVGKQKWKHKFGRSSKQPSTARAR

SEQ ID NO: 53987 - protein, 711 aa, Oryza sativa
MGGGPRTFPGGLSKWQHKRMHEKLARHKERGLLRHEKQLYLARLRSEIRASRLPAAGASPPDDGDGPTSSRAHIRALADRFLLPGAEDLWNEDDGPIHRADRPRPPRRIVSVGGNGGDRRKLDSTKQELPRGGKEPRLAAFNPRRDFQTAAPWWWQWSSSSAIPSRTKEASFCFFGPKRSYSVMPLFQAHQESSGTSMVPLIARGLASARIAPSQLNGERFYSFAAGRFGRKFRPDSSDEDDEDISTAKKDMRFARFGASSEEESGYDELEARSAIRKKWSSAALRNCDMKKERRALKSYEEENNDLAGSFRELREEIKNREVLGAERRRYESRGESLFTNKRFEECGISPLTVKALTDAGYVQTTVVQETALPMCLEGKDVLVKAKTGTGKSAAFLLPAIESVLNAMKSHTNHRVSPIFSLILCPTRELAIQLTAEANVLLKYHQGIGVQSLIGGTRFKLDQRRLESDPCQILVATPGRLLDHIENKSSFSVRLMGLKLLVLDEADHLLDLGFRTDIEKIVDSLPRQRQTLLFSATIPKEVRRVSQLVLKRDHVFVDTVGLGAVETPTKVEQLYLVMPHELHFHMVYRLLREHIDQEVDYKVIVFCTTAMVTEFMYIMLRDLKLNVREIHSRKPQLYRTRISEEFRDSSRLILVTSDVSTRGVNYPGVTLVIQVGVPSDREHYIHRLGRTGREGKSGKGILLLRHGKSIS

SEQ ID NO: 53988 - protein, 674 aa, Oryza sativa; identical to SEQ ID NO: 53042

SEQ ID NO: 53989 - protein, 472 aa, Oryza sativa
MSELASAPKVALGSIAFAVFWMMAVFPSVPFLPIGRTAGSLLSAVLMVIFHVISPDDAYASIDLPILGLLFATMVVGSYLRNAGMFKHLGRLLAWKSQGGRDLMCRVCVVTALASALFTNDTCCVVLTEFVLELAAERNLPAKPFLLALASSANIGSAATPIGNPQNLVIAFNSKITFPKFLMGILPAMLVGMAVNMVMLLCMYWRELGGGAELSVDGKQMEAVEEGRSPASAKSTPQLNGNGNTMMSLEMSENITTKHPWFMQCTEARRKLFLKSFAYVVTVGMVVAYMVGLNMSWTAITTALALVVVDFRDAEPCLDTVSYSLLVFFSGMFITVSGFNKTGLPGAIWDFMAPYSKVNSVGGISVLSVIILLLSNLASNVPTVLLMGDEVAKAAALISPAAVTTSWLLLAWVSTVAGNLSLLGSAANLIVCEQARRAPRNAYDLTFWQHIVFGVPSTLIVTAVGIPLIGKI

SEQ ID NO: 53990 - protein, 358 aa, Oryza sativa
MGMPLLLLLLILVAAGPQAGRAAKPIPNLQLMTKEGGSSRIIQDDIIKAINKHPNAGWTAARNPYFANYTTAQFKHILGVKPTPHSVLNDVPVKTYPRSLMLPKEFDARSAWSQCNTIGTILDQGHCGSCWAFGAVECLQDRFCIHFNMNISLSVNDLVACCGFMCGDGCDGGYPIMAWRYFVRNGVVTDECDPYFDQVGCKHPGCEPAYPTPVCEKKCKVQNQVWLEKKHFSVNAYRVNSDPHDIMAEVYQNGPVEVAFTVYEDFAHYKSGVYKHITGGMMGGHAVKLIGWGTTDAGEDYWLLANQWNRGWGDDGYFKIIRGTNECGIEEDVVAGMPSTKNMVRNYDSAFGVGAAIV

SEQ ID NO: 53991 - protein, 612 aa, Oryza sativa
MEAPAGGGYLLGGQPARCSGGHSTGSNGEGFGGHPATSPPSSSWVSLTREHNEEMRTPNAFFGLGTNSGEDIEMGDGDSDSEQVGPVDEHVNPVIQALTRKFRSEAWKEFVPILIDNEVGAGKCKHCDTEIRAKRGAGTSSLRKHLTRCKKRISALKIVGNLDSTLMSPNSVRLKNWSFDPEVSRKELMRMIVLHELPFQFVEYDGFRSFAASLNPYFKIISRTTIRNDCIAAFKEQKLAMKDMFKGANCRFSLTADMWTSNQTMGYMCVTCHFIDTDWRVQKRIIKFFGVKTPHTGVQMFNAMLSCIQDWNIADKIFSVTLDYASANDSMAKLLKCNLKAKKTIPAGGKLLHNRCATHVINLIAKDGLKVIDSIVCNIRESVKYRDNSLSRKEKFEEIIAQEGITCELHPTVDVCTRWNSTYLMLNAAFPFMRAYASLAVQDKNYKYAPSPDQWERSTIVSGILKVLYDATMVVSGSLYPTSNLYFHEMWKIKLVLDKEHSNNDTEVASMVQKMKDKFDKYWLKSYKYLCIPVIFDPRFKFNFVEFRLGQAFGENAKERIDKVKKRMNMLFKEYSDKLKDSNANPLRQAEHVMAISENDPMADWVQHISEQ

SEQ ID NO: 53992 - protein, 455 aa, Oryza sativa
MASAVERREHSRRSGRSRSRSPARDRGSPPRRRERSPAARSRSPRRRSPVKSTSSHRERSPVRRNGSPRRSPVRSIGRSPQRDRVKEQVRSPKQSWSRSPSPARKRESWSPSPQSKRLRRAQSEREGADATEGDRRKTTRERDEGKDVSRDRKAEREEGSFKDRKLDCDDDRDHSRDRRSDRSGASRETWSSRDYEGRDSRGRRSDGDDQKGICREQRADHDDRKDSARERRADRDESNGESGRSSRRGRSVSPEEHRHRGRHESQSHQSPRSSRSAARGEGHSDWKKFRPGLPEYLPEMDRMFEGVAVDGSASFVATAEEPIECDSSDEADGDEQEDELTPLSVGNKRTSPSKKSKSPAVRAMVSNMREYNDLQRSKISLMQSMLQVMQDVAEAKRKAAEAERRAAEAHMIAAEAQANAHEMKIKKVLEMAGVWGHSRRKPKAVHGRGQHYPEW

SEQ ID NO: 53993 - protein, 698 aa, Oryza sativa
MASSPSPSPGTATPATAAAAPSTATPTPATQPNATPADPSITPPAASPPLPSAATPPPQPDSPPPSPPPAPPVAVPPPATVPPPPVPVASPPPTPSATLPPPSPPASVPVPPTPATTPPKPSPVQQPPVAASPPPSSPADLPPPNPPARSDTPPVVQSPPPPHRRSPRTPWAPPMAPSPSGSPTKPSPASPSPIAGDPIIPTPNNPSSPLATPSAPGSGTPVVTPSAPVSGPPSPGTAPATAADRSNKSLSPNTQDGSVSSSDGGMSSSAKAGIGVVVAILVLSLVGAAFWYKKKRRRATGYHAGFVMPSPASSPQVLGYSGKTNYSAGSPDYKETMSEFSMGNCRFFTYEELHQITNGFAAKNLLGEGGFGSVYKGCLADGREVAVKKLKGGGGQGEREFQAEVEIISRVHHRHLVSLVGYCISGDQRLLVYDFVPNDTLHHHLHGRGMPVLEWSARVKIAAGSARGIAYLHEDCHPRIIHRDIKSSNILLDNNFEAQVADFGLARLAMDAVTHVTTRVMGTFGYLAPEYASSGKLTERSDVFSFGVVLLELITGRKPVDASKPLGDESLVEWARPLLTEAIETGNVGELIDSRLDKNFNEAEMFRMIEAAAACIRHSASRRPRMSQVVRVLDSLADVDLSNGIQPGKSEMFNVANTAEIRLFQRMAFGSQDFTTDFTQSSWDSRSRDVDASGSRPL

SEQ ID NO: 53994 - protein, 210 aa, Oryza sativa; identical to SEQ ID NO: 53546

SEQ ID NO: 53995 - protein, 418 aa, Oryza sativa
MAYGKGEQRVATTQGKCWGIFICWLLGNGCLFGFNSMLTIEDYYTFLFPNYHPTRVVTLTYQPFVLRTTAIFTYHEAKVNTRLRNLAGYTLFFLSSFAAIVLDVATSGRGGITPFVGVCIIAAAFGVADGHVQGGMTGDLSLMCPEFIQSFFAGLAASGMITSALRLITKAAFENSRDGLRKGAMLFSSISCFFELLCVLLYAFIFPKLPIVKFYRSKAASEGSLTVAADLAAGGIQNRANPLSEEDPSCVERLSTKQLLLQNTDYALDLFLIYLLTLSIFPGFLAENTGSHSLGSWYALVLIASYNVWDLIGRYIPLIEQVKLRSRKVILIAVVSRFLLIPAFYYTAKYSDQGWMIMLTSFLGLSNGYLTVCILTEAPKGYKGPEQNALGNLLVLSLLGGIFCGAILDWLWLIGKGW

SEQ ID NO: 53996 - protein, 577 aa, Oryza sativa
MDEAAAGQRASPLLAKNDGSSYGEESQSLLEEQEPQVKTKQSGWRAPSIILGLECLESMAFNGIATNLVVYIRSVLHGGIASSASTSSLWYGTSFFVPILGATIADTYWGNYKTVLISFIMYLLGTVFITVGAFLPSAPALCNTESCSSMNGTQHLVYFSGLYLTAIGCGGVRSALLPLGADQFNNDSSLDIQKRRNFFSLFYICVIFGVITSGTIVVWIQENVSWAIGYGVATACIALALIGFLVGTPIFRRHEPHGSPVRSVFQVIVASFRNLALELPADSSLLYEVRRKNTQKSEPKLAHTDDFRFLDKAAIMSDLSLDQDSCTSPWRICTVTQVEELKILIRLLPIWATGIFFCVGISQMHTTFIQQGTVMNTKIGSLSIPAASLYSFEVICVTFWVFLVNKVIIPVTRACFANGAEMTQLQRIGIGRFLMIFAMAIAAFLEMKRLESVQGGDQPLSIAWQLPQYFVIAGAECFTIITQLEFFHGQAPDSMKSMLTALALLTTALGNYFSSAIITLIARVTGTWHSPGWIPDDLNKGHLDYYYWCLAAISAVNFVVYIYFASKYKLKKAVIQV

SEQ ID NO: 53997 - protein, 525 aa, Oryza sativa
MDPSSKSPDDDDLRPEAEAARRPQPQPQPREWRFAQVFGERAAGEDVQEVDIISAIEFDKSGDHLATGDRGGRVVLFERTDSRDSASRSELERQDYPIARHPEFRYKTEFQSHEPEFDYLKSLEIEEKINKIKWCQTANNALFLLSTNDKTIKYWKVQERKVKRISVMNLNTSQSSGNGTTSSSSSSSSRAILPNGGCSEKLYNFPNNDLLFPPGGCTSLRLPVVVTGQDLNLVPRCRRVYSHAHDYHINSISNNSDGETYISADDLRINLWNLEISNQSFNIVDVKPANMEDLTEVITCAEFHPTHCNTLAYSSSKGSIRLIDLRQSALCDNHAKLFEEHEAPGSRSFFTEIIASVSDIKFARDGRHILSRDYMTLKLWDINMDSGPVATFQVHEYLRPKLCDLYENDSIFDKFECCLSGDGLRVATGSYSNLFRVFGCTPGSAEATTLEASRNPMRRQVANPTRPARTLTSLTRAVRRGGENPGVDANGNSYDLSTKLLHLAWHPTENSIACAAANSLYMYYA

SEQ ID NO: 53998 - protein, 505 aa, Oryza sativa; identical to SEQ ID NO: 45355

SEQ ID NO: 53999 - protein, 690 aa, Oryza sativa
MAAAAAPESYIGSVISLTSKSEIRYEGVLYTINTEESSIGLRNVRSFGTEGRKKDGQQIPASDKIYEYILFRGSDIKDLQVKSSPPAQPTTLHNDPAIIQSHYPCPASTSLPPPASTAADPASHNGQSGIQMPPPLPQFQPGASLPSWNSSPMPSSANGAPASTTTADPGSHNGQSGIQMPPPLPQYQPGASLPSWNSSPMPSSANGAGLTMPPMYWPGFYTPPSGFPHLQQPPFLRPPHGLTIPQALQQPIQYPGLNAPLPPFPRMPEFALPQPGSGNNLTQNLGVSTSMPVPALSSTPATESSANQLPNMLSSVSASVFSLGLTPPSVNPPVSTIESTMSQSQGISPLMNNKPVSLPLDSTVPSASSNKPMNIPVPTYLPSSQPPLANIAASAATVAEPVTLVTPGQLLPTISSTVLSADALETASAMIPSPKAASSMVSSSQAALAASSQVTSSVVSPSEDQFASSPVPSHQQLEQNNEDRHTKKREWKAKQHSVAPSNKEPLLPAPKPTLQKPVGASSYIQYNNRGRGRGRGRGRGIGQSRPITKFTEDFDFMAMNEKFNKDEVWGHLGKSKGQLNDDPNEYEDDVLEDDISPGKPEVKPVYVKDDFFDSLSCNTIDNGGGNGRIKFSEQRKIDTETFGDSARHRPMGMRGGGRGPRGGPRGRGYYGRGYGYMGRGRGYSYPNHQS

SEQ ID NO: 54000 - protein, 514 aa, Oryza sativa
MNGGDAAAAAATPSHRRLPDFLQSVNLKYVKLGYHYLITHLLTLLLLPLMAVIVLEAGRTDPDDLRQLWLHLQYNLVSVLVLSAVLVFGATVYVLTRPRPVYLVDFACYKPPDKLKVRFDEFLHHSKLCGFSDDCLEFQRKILERSGLSEETYVPEAMHLIPPEPTMANARAEAESVMFGALDKLFKFTGVKPKDVGVLVVNCSLFNPTPSLSAMIVNKYKLRGNIKSFNLGGMGCSAGVIAVDLARDMLQVHRNTYAVVVSTENITQNWYFGNRKSMLIPNCLFRVGGAAVLLSNRGADRRRAKYALKHVVRTHKGADNKAFNCVYQEQDDEGKTGVSLSKDLMAIAGGALKTNITTLGPLVLPFSEQLLFFATLVAKKLFNAKIKPYIPDFKLAFEHFCIHAGGRAVIDELEKNLQLQPVHVEASRMTLHRFGNTSSSSIWYELAYMEAKGRVRRGHRIWQIAFGSGFKCNSAVWHALRNVNPSPESPWEDCIDRYPVELVDGFATHNNTQQ

SEQ ID NO: 54001 - protein, 576 aa, Oryza sativa
MAVEGRRRVPLPLPPPTRRGKQQQQQGGGRARRVQAGDALPLPIRHTNLIFSALFAASLAYLMRRWREKIRTSTPLHVVGLAEILAICGLVASLIYLLSFFGIAFVQSVVSNSDDEEEEEDFLIDSRAAGPVAAQATPPPAPAPFSLLGSACAAPKKMPEEDEEIVAEVVAGKIPSYVLETRLGDCRRAAGIRREALRRTTGREIRGLPLDGFDYASILGQCCELPVGYVQLPVGVAGPLVLDGERFYVPMATTEGCLVASTNRGCKAIAESGGATSVVLQDGMTRAPVARFPSARRAAELKGFLENPANFDTLAMVFNRSSRFARLQRVKCAVAGRNLYMRFSCSTGDAMGMNMVSKGVQNVLDYLQDDFPDMDVISISGNFCSDKKSAAVNWIEGRGKSVVCEAVIKEEVVKKVLKTNVQSLVELNVIKNLAGSAVAGALGGFNAHASNIVTAIFIATGQDPAQNVESSQCITMLEAVNDGKDLHISVTMPSIEVGTVGGGTQLASQSACLDLLGVKGANRESPGSNARLLAAVVAGAVLAGELSLISAQAAGHLVQSHMKYNRSSKDMSKVAS

SEQ ID NO: 54002 - protein, 561 aa, Oryza sativa
MEAARESMAALVDAGLYDCAQTLGCFLVSSSPASSEAGMSMKVESLVLHGDALHGEKEFRRALSAYKQAMQYSKNIPRQATSNTRSSVTATGRSPSPNSSSLAPLNENEVKFKIALCYSALREHREALQEMEGIPSKARTLKMNLMLGKLYRISRNNRAAAVCYKECLRQCPYVFEAITALAEMGLSSKEFSLIFSQAPNRGGKAPGDSLDAQRWWNRYVEAQCCIASHDYKGGLDIYLDLMQRFPNNVHILLEIAKVEAIIGRNDEAIMNFEKARLIDPNIMTYMDEYAILLKSKSDYTKLNKLVHDMLHIDPARPETCLALAALWERKDERKALTYAEKSLRVDDRHITGYIMKGNLHLLLNRPDLAVTDFRGAQELRADLRSYQGLVRAYLALSKCKDALFTAREAMKVMHQSAKALKLVGDVHAISSSGREKARKFYESAIRLEPGFLGAALALADLHVAEGRNKDAVLLLERYLRQWTDDSLHIKLAQVFAATNMLSDALSHYQSALRINPHNEAAKKGLERLEKQMKGVDPDAPEEDEENEADDVDGDQDDAELL

SEQ ID NO: 54003 - protein, 224 aa, Oryza sativa
MAQPDIPAFGNWDTTGNTPYKQKFENARKNKKAGISSHPNDPRRHPEPPSKSPLHPAYTPDAQGQSPMNPQHGRRQEADPHRRHSLSQQREVGGSIGSAPRSPYRMVHGSASPAQPNNPSKPKHRSSGMQTPERRASSEGHGQHTPRRSRDKQGGRGYDAPEDDVAVPPFGEWDEGNAASGEKFTGIFNRVRDDKLSPNTSTRQPDTNRSQENKVKQTCPCCIL

SEQ ID NO: 54004 - protein, 374 aa, Oryza sativa
MEPVAVVAVPFPAQGHLNQLLHLSLQLASRGGVDVHYAAPAAHVRQARERVQGGDDAALRSVRFHDLGISTYASPPPDPAAASPFPSHLMPLWEAYTAGAPAPLAALLDKLSASYRHVVVVYDRINDFAAQEAARLRNGEAFVMYCLAVSMLARRIAPQEHQRILRENGLTNITVEDCATEEFVDYIRRTRATKEMSPPRGILTNTCRALEGEFIDVVAGNLAADGKKVFAVGPLNPLLHGNASKQGDQRQRHECLDWLDKQPPASVLYVSFGTTSSLRAEQIEELASALRGSNQRFIWVLRDADRGDIFAEDSGEIISRHAKLLREFTQHNEGSTGLVITGWAPQLEILAHDATAAFMSHCGWNSTMESLSHG

SEQ ID NO: 54005 - protein, 508 aa, Oryza sativa; identical to SEQ ID NO: 36555

SEQ ID NO: 54006 - protein, 511 aa, Oryza sativa
MAPRPRKRVSRPKPRATSRGRGGGDEDPFFESEPKRRRGGGRDEDIESEDSDLEGVAAAAAGGVGDDGEEEEEEEEEQETAGEKKMRIAKELLKKVTDAARRRREDDEDEDEGEEAGRRRVADILLKRQFEESGRKRMELADRILQPDPEDGFKMLVKHRQPVTAVVLSKDSDKGFSASKDGVIVHWDVETGKSEKYLWPSENVLVSHHAKPPLSAKRSKQVLALAVSADGRYLASGGLDRHIHLWDVRSREHIQAFSGHRGAISCLSFGPDSSELFSGSFDRKIMQWNAEDRTYMNCLFGHQNEVLTMDALSKDRLLTVARDRTMHLWKIPEESQLLFRAPATASLECCCFIDDKEFLTGSDDGSVELWSIMRKKPTHIIRNAHPVFRNNLNSLENNVEENGIHKPESVSSAQSWVSAIAARRGSDLAASGAANGSVRLWAIEPDSKGIRPLFSLRLDGFVNSLAIPKSGRFIVAGVGQEPRLGRWGRVRSAQNGVVIHPIRLKEESEDL

SEQ ID NO: 54007 - protein, 502 aa, Oryza sativa
MGGDPTRCVAELEMKTDSCVIDIPSLAKELRVELSSFKSSTARVVGGAAPPPCIIVDKVGESTRIHDPHEYVPQYVSIGPYHRAADLAGEAIKVKYLGDVLSAAAASSTAPMTLEDCLSELAHLEHSVRRCYVHSFDIPSREFVRMLLLDACYILVRFGDVLTPRTAAPPQPAAAAAEEVAVANGVVHAGHRVVPTEERRAAADDQQMAVAVVRDVLYLAENQIPFFVVDKVHQLTFLDGETPVLDAIARYAHDLLSWTEYSVATPTIVAPPALRPEPANLLHLLHMHFTPTVLASGKVSRGGRSVGRWRTATEYHYAGVTFKRRPLSSGGGARSILDVKVSRRGGALQVPRLSIDGETWRLLRNLMALEQSNPSAAGSHVTAYCVFMSQLACTARDVELLSRRGVIVHGLGNDGEVAGLFANLCKGAVFDFDEADQNYLRPVCQVLDRRFRSRPRRWMASLRQKYFLNPWLTAGLVAATIGLVCTVIQAVYSVLSYVKPGN

SEQ ID NO: 54008 - protein, 594 aa, Oryza sativa
MVANPILLLGPPIAVPDGGGAAAAVQVTWLSGRPLTSGDPCLDFFFQIVPGDTEVARVGDLLDAAWVRDPLTALKLVCHLRAVRGLGKADREGFYAAALWMHDHHPRTLAANLAAFAEFGCFKDLLEIVYRVLHGPRDEHKEEEEEGDDQTESEDGRRRRPRLRFKRRCIDHAEAAKARLQKEAQLAQSVLSRYGSDVSFRFLYDGVADTFAELLKSDVEHMRAGENAKIGLAAKWCPSLRSSYDRATLLCEAIARRMFPRESSQEYLFLSDEHYAYRVRNRLRREVLVPLRKVLELPEVYMTAGKWEQMPYARVPSVAMRQYKGAFEKHDKSGVAGFLDEVRTGHARLHVGAAMPHELVAAALKGEHDEAAELQWRRMVSALAAGGRLSNCIAVCGLSSGGDVAKPPGAAAVALGLLISELSQDPWKGRVITFDATQQLHKVCGATLVGKLRSLAAPVRAAPKGSSLNLQGVFDRILTVATYGGLAKDMMVRRVFVLSDMELNASAWRVQDELKTIRSKFTAEGFTAPEVVFWNVGAPASAPVVATEANAAVVSGYSKNLVRLFLEWDGQLTPAAVMADAISGPEYDSLEVVD

SEQ ID NO: 54009 - protein, 772 aa, Oryza sativa
MALHRFYQRSPSSVSHLVSNFRKRLCDNDPGVMGATLCPLYDLILEDPNSYKDLVVSFVNILKQVAERRLPTSYDYHQMPAPFIQIKLLKILAVLGSGDKQASGNMYMVLGDIFRKGDTASNIGNAILYECICCISSIFPNAKMLDAAAETTSKFLKSDSHNLKYMGIDALGRLIKINPDIAEEHQLAVIDCLEDPDDTLKRKTFELLYKMTKSTNVEVIVDRMIEYMINITDHHYKTEIASRCVEMAEQFAPSNQWFIQTMNKVFEHAGDLVNIRVAHNLMRLIAEGFGEEDEGADSQLRSSAVDSYLRIVGEPKLPSSFLQIICWVLGEYGTADGKYSASYIIGKLYDVAEAHPTDDTVRAYAISAILKIFAFEIALGRKIDMLPECQSLIDELSASHSTDLQQRAYELQALLGLDKQAVENVMPADASCEDIEIDRNLSFLNGYVQQAIENGAAPYIPESERSGVVSVGNYKAQDQQETSAHALRFEAYELPPAASQASISPTTDLVPVPEPSYYKEDHQMSRSQPSGDSLSGEFGLKLRLDGVQKKWGRPAYSSSSTPSSSTSSQQATNGGVSSEVGGSTSSQARESTYGSKRQQATEVSAEKQRLAASLFGKADRKTQAGRKTAKESSSTEKVATANATPQPAKEQVIPSAPPPDLLDLGEPVSSSPPLADPFTQLEGLLGPASASPVVSETPASSTSKTPDLMSIFSDDVQTGVTSGSTEPSLGVNVVAAKKGPSLQDALQKDAAARQVGVTPTGNNPILFKDLLG

SEQ ID NO: 54010 - protein, 899 aa, Oryza sativa
MLADILVSKTTDLDDAGGGCNLIPTIAVTGAGGIGKTTLARMVFGDATVQESFDARIWLFVGRDADEVTMLRSAIAHAAGAASCEGLAVAGDKDLLERALQRAVTHRKVLLVMDDVWSDAAWNELLRVPLSHGAPGSRILVTTRNDGVAHRMKVRYLHRVDKLRRQDAWSLLKKQIVLNKSDEAELDELEDIGMQIVDRCDGLPLAIKMIGGLLLSKSRTRGAWMEVSRHSAWCKHEVNDEINKVVCLSYGELPSHLKQCFVYCSLFPRGEVIESRTIVRMWIAEGFVQDSTGSGLPEAVAAQYYKELVLRNLLDPSDGYYDQLGCTVHDVVRSFAQHVAKDEGLSINEMQKQTIGDALGTLKFRRLCISNKQVEWDALQRQVSLRTLILFRSIVTKHKNFLNNLSCLRVLHLEDANLIVLPDSICHLKHLRYLGLKGTYISALPNLIGNLRFLQHIDLCGCINVSELPESIVRLRKLRSLDIRHTMVSSVPRGFGKLENLVEMLGFPTDLDDSTHDWCSLEELGSLPNLSALHLEVLEKATLGQMAARSKLSSKQNLTQLELRCTSRISANGTVQGGISEEDCERIENVFEHLRPPPSIDRLTIAGYFGHRLPQWMATATAFRSLRRLVLEDYACCDRLPGGLGQLPYLDYLWIEHAPSIEHVSHDFILPPVGIAVDGNAPSTTTTTTKTEGAGIAFPKLKRLGFQGMLRWASWDWDEHVQAMPALESLTVENSKLNRLPPGLVYHTRALKALVLTNAVSLESVENLHSLVELYLADNPKLEMVVNCSSLTKIEILRCPELKAFDRLPAVRSIVWEDLDADTLPGYLQEAKVKRLHINCNLSLLNLISLQDASSEEWRSVRHVQQLKVFGFKPQSETSECYFLYTKEPYHVETNISKA

SEQ ID NO: 54011 - protein, 464 aa, Oryza sativa
MERRIVTQLMTCMDEYHQQIGSGSGDVGSESAEKKPGYVIVIGATNRPDAVDQALRRPGRFDREISLGVPDEYARKKILMMLTRNLRLEGQLDLLKIARATSSFVGADLKALVDKAGNLAMKRIIDRRRAQFCQEHDENSKHDWWRQPWDANEIEGLSITMDDFEEATKMVQPSLRREGFSSIPDVTWDDVGGLDSLRKEFDRYIIRCIKQPEEYKTFGLNMQAGFLLFGPPGCGKTLIAKAVAHEAGANFIHIKGPELLNKYVGESESEVRKIFIRAQTNTPCILFFDEVDALTTKRGKEGGWVVERLLNHLLIELDGAGERKGVFVIGATNRIDVIDDAALRPGRFGKKHYVPLPGADERVSILRALARNKPISSSVDLGALARREECKNLTGADLASMVNEAAMAALEERLEFLENGESSMSSSSAIELPHFERALAKMQPSVSEQQRRHYEALCKKYSAS

SEQ ID NO: 54012 - protein, 717 aa, Oryza sativa
MAAAAAAAAAASTASSISALVAAGRLFAALDALPPSYSSSQVPSAVYASLLRLATSHRSLAAARRIATHLASSTAPSTSHSFTATSTFLFNRAVESLAACGSLTDARKLFDAMPRRDGGSWNAIISAYSRGEEPTEAISLFSAMNSCGVRPKDVTLASVLGCCAECLDLHGARQLHGHIAKRDFQSNVILGTALVDVYGKCFALSEARRAFDGIPKPNDISWNVIIRRYLLAGMGDMAIDMFFRMVWAGVSPLVYTVSQALLACRDNGALEEGRRIHTFVLRHGYEQHVHVRSSVVDMYAKCGAIDLAQRLFDLAPVKDIVMSTSIVSGLASCGRITDAKRVFEGMEEHNLVSWNAMLTGYVRSMDLTSALQLFQQMRQETKELDAVTLGCVLNACTGLLDLGKGEEVHTFAFKSGFIGYPFLKNALLRMYSKCGCLRSAERLLLFEMGSERDSYSWNSLISGYERHSMSEAALLALSEMHYEATPNQSTFSSALAACANIFLLNHGKQIHAYMIRNGYVIDDILQSALIDMYSKCRLFDYSMRIFEAGPSQDVILWNSMIFGCAYNGKGEYGLELFFEMSKQGITPDSVTFLGALVSCISEGHVGLGRSYFTQMTDEYNIVPRIEHYECMIELLGKHGYMVELEDFIGHMPFEPTTAMWLRIFDCCREYGNRKLGERAAQCINDSNPLTPVRFEIAPDYKYCDDDSDESMSVSWEG

SEQ ID NO: 54013 - protein, 248 aa, Oryza sativa
MKVEETKIVLRMLPLFISSMIGYISNPLLLTFTVQQGSMTNTRLGKIHISPATLFVIPITFQMLMLAVYDRFLVPFMRKRTGYACGITHLQRVGLGFASMIVASAVAAVVERKRKEAAVQMSLFWLAPQFFLLGVSDVTSFVGLLEFFNSEAPKDMKSIGTALFWCELGLASWMGTFLVELVNKATRHGHHRGWLEGTSLNNSHLDLFYWVVAVIGLLGFLNYLYWAKKYAYRHNPRMVTPSADQDSP

SEQ ID NO: 54014 - protein, 495 aa, Oryza sativa
MGPHPPSSYSDKKTCQNVPPEKPSSTSFCHPQFPQHLLSHPAYAMNFPFPPFPHYPPYSQNFQYAVPPQYAPYSLPPPDGAMPSPYVPATVMPSKAPSDQGTPHSVTGPGQQDDDDAEPERTARRLAWTEEEDIRLISTWLINYKTDKYWDKVAAEYNSATPGARRREVKHLKNRWQRMINKVAHFNDCWCRVMAKYPSGQSEGMQQMDKTWLMYNKEAHVMYLEEAKHKFTFGHCWNAVWDQPKWKEYISSFSAKRVMRSESGGYVSSSEDSEDMQEGKCLVDPLDMLPKNHEDMTEVQPSVSNQKKQLELLTADASWPIEFQLGRHQLMTGTSKLNEHQQGVAVRDEMLEKESGPQDFEVLDNERVAREDEPKKETQPHQGFKARKVNRKRKGKASSSSCEVQEDIKHALYLQTMLNNDREKMSEVQLRLSKEQLELARIKQDEANVKKETALYMKYTELLLADTSRFDEFQKAEYEKALKHIGGILFSKDVN

SEQ ID NO: 54015 - protein, 422 aa, Oryza sativa
MGPTAPPPDAGGGEPEAWYGSIQYLVNISAVGAASCVLLFLLVKLRFDHRRIPGPSALAAKLLAVYHATAPQIALHCGADAAQFLLFERASFLVLAAVAAAAVAAALPLNLLAGDAAIADQFAATTISHIPKSSPLLWLHLLLTAAVVAIAHLGISRMEDALRITRFRDGNGNPSDPNSSSVAVFTIMIQGIPKTLAADKTPLKDYFEHKYPGKVYRVIVPFDLCTLEYLAEEWGKVRNRISWLEARMDARNLFDEFAQGGRHSEEHWIVRRCKELWVMTAERFGFTDEEMLRRLQTKKLVLGSRLSDYKDGRAPGAGIAFVVFKDVYTANKAVRDFRMERKKTPIGRFFPVMELQLERSRWTVERAPPASDIYWNHLGLSKTSLGLRRIAVNTCLILMLLFFSSPLAIISGMQSAARIINV

SEQ ID NO: 54016 - protein, 777 aa, Oryza sativa
MGKTKGKQRQDKFYHLAKEQGYRSRAAFKLLQLDARFRFLPTARAVLDLCAAPGGWVQVAVNHAPVGAFVVGVDLVPIRPFRGAHSLTEDITTTKCRAAVRRLMDSNGVAAFDVVLHDGSPNVGGAWAQEATAQSSLVIDAVRLATMFLAPKGAFITKVFRSQDYNAIMYCLKQLFEKVEVTKPTASRSTSAEIYIICLRYKAPAKIQPELLDIKHLFSVDPDPKKVRDPLKPDRQKRNRDGYEEGNTTLRKVGLASDFIWSEGQTPLEFLGSFNAISFDDPASLPIKNHELTTDEIKALCKDLYVLDKNSFKHILKWRIRIRKALSSSEVTKKTDDTAVEVNVKDDDQLLQEMEELTSVIDRKKKREKKRQSKRRAKDKARKATGMQIDATGDNYGDPDLFSISAIKGGKELQAIESAELNVEDAQGDSENEDIQTREYSDEEMDSDEEQQRYDAQLEEMLDEAYERYVTKKGGEVKQERKRAKRVNTDADEELLEGGEDDGDDVDMDQGSDEEQDQETNPLLLSLDAEKPTKEQMMEQWFSQDVFTEAGTGVVEQSDSEDEREQLTRIAKKKADSGKKEKSAKAKHLQQDDFGIVPAEPVRTEDDSSSSSDESDELDEDLDDDTKAEVLAYARKMLRKKQREQILDDAYNKYMFDDEGLPKWFAEDEKRHNQPMKPVTKEEVAAMRAQFKEIDARPAKKVAEAKARKKRVAMKKLDKARQKGRCHRRSKRHKRAVKEEDDRQDLQEGDSKEAPEGVRCRKEGRSGEGWQREDTGG

SEQ ID NO: 54017 - protein, 556 aa, Oryza sativa
MDSARSWFQKFQPRDKSKSPAVAASHGKDPGKPPIDDAPSSATKQRVAAAKQYIENHYKTKMKSLQDRKERRWMLERKLQDAEVPVEEQNNILKHLEKKETEYMRLQRHKMGVEDFELLTIIGRGAFGEVRLCREKASKNVYAMKKLKKSEMLRRGQVEHVKAERNLLAEVDSAFIVKLYYSFQDEEYLYLIMEYLPGGDMMTLLMRKDTLTEDEARFYIAETVLAIESIHKHSYIHRDIKPDNLLLDRSGHLKLSDFGLCKPLDSSNFPNLNEPDYTSTKGTKPLPDSSSRLSSSALKRTQQEQLSHWQKNRRMLAYSTVGTPDYIAPEVLLKKGYGMECDWWSLGAIMYEMLVGYPPFYSEDPMSTCRKIVNWRSHLKFPEEAKLSPEAKDLISKLLCNVEQRLGTKGAHEIKAHPWFRGLPWERLYQMKAAFIPEVNSELDTQNFEKFEETGAQIQSSSKSGPWRKMLPSKDANFVGYTYKNFEIVNDDEVAGIAELKKKSSKSKRPTIKTLFESMDEDEPVQGSFLNMLPHKEGQPSSHSTIPPEQYQPRHK

SEQ ID NO: 54018 - protein, 701 aa, Oryza sativa
MDAEGLLASAAINLGLALVALSLFSLLKKQPGNAPVYLARRMAAGGGGGGLPLGHGRLTPSFRWIRAALRLSEDDVLRRHGLDALVVVRLFKFGIKCFAVCSIVGLFILAPTNYSCEGLQDTKRSNSMELFTVSNVARGSNRLWVHFACLCFISFYVVYLLHKEHKEMSSRRIAHLKYHRKRPDQYTILVRGIPLCPDHGTYGCYADHFFSKHYRTYQSYHIVHDIGNIKALQKLASSLEDKIKRKRETRRCNFWKWIWFKLTLEAIDTRKLEEKLKNVHHSIRLLQCENMLKRKELPVAFVSFKSQLDAAQAAEMQQHVNPLSLVTTYAPEPPDALWTNLAIPFCRIAIYKLGVFIAAFLLIVFFSIPVTAVQGIVQFEKIKIWFPPARAVELIPGLNSVVTGYLPSMILNGFIYLIPFAMLGMASFEGCIAKSQKEIKACNMVFYFLLGNVFFLSILSGSLLHQIGESFTHPKDIPSRLARAVSAQSDFFITYILTDGMSGFSLEVLQFGLLTWHFFKAHSIGHSEQPYLYGFPYYRVVPIVSLAVLIGLVYAVVAPLLLPILVIYFLLGYAVYINKMEDVYEITYDTCGQYWPNIHRYIFLSVTLMQITMLKSKPGASFATVPLLVSTILFNEYCKVRFLPTFLHRPVQVAKENDDLNEAEGMRGDLDHAISAYKPPWMRPTNFSPDCSSVQPLIRSV

SEQ ID NO: 54019 - protein, 708 aa, Oryza sativa
MPSPPPPPQPSPPELPISEHEDEIMAAVEANPVVVVIGETGSGKSTQLSQILHRRGYTRRGAIAVTQPRRVATVSVSRRVAQELSVPLGDEVGYAIRFEDRTSEKTCIKYLTDGVLLRESLSDPELKQYSVIILDEAHERSLNTDILLGLMKRLIKDRASDLKVLITSATLDGLKVSKFFSGCPVLNIPGTLFPVEKFYSTEHPTNYIESSLRTAIDIHVKESPGDVLIFMTGKDDIDKMVSKLEERIQNLEEGSCMDALVLPLHGSLPPEQQVRVFAPAPPNCRRFIVATNVAETSLTVDGVVFVIDCGYVKQRQYNPSSGMYSLDVVQISRVQADQRAGRAGRTRPGKCYRLYPISIYQKEFLEATIPEIQRSSLAGSVLYLKSLDLPDINILKFDFLDPPSRESLEDALRQLYLIDAIDENGQITDVGRIMAELPLEPSLSRTLIEANELGCLSQALTVAAVLSAEITFRSTRSKDMEGKRKRQELPDGSGWGDHIQLLQIFKSWDRTGYDPRWCSDHELQVRGMKFSKDVRNQLSQIIQKIAKGSTDVQAKKERKSDPDYRKLRRALCVGYGNQLAERMLHHNGYHTVGYRAQLVQVHPFSVLEGDEYGKLPVYVVYHELINTTRPFMRNVSAVDQSWVKPILKKLERLDMNKLSGGSSGSKDPEPLEDKQVSSPKKAMDVKQSDVDSKIQAARERYLARKGKK

SEQ ID NO: 54020 - protein, 239 aa, Oryza sativa
MLYLDSKLLIFSVEIVNSRAANTIVLFSRKLIFSIQIFYFQLELALMVEKLQELRSMRVQKMKKQGHFLPEEDDKYLERVKAAVEEEERQAASAARTDAAKDAILTAEESRKAVQCSNSREDDSDQAKSAPTLEQNQRDPGISGRNHHASQKTEHELHKDDSKGHGHYDSVSSLPFEFYHYYHGSSYDMGTLIEVRRMWDSFIRAGGSRIPGHWVQPPPPADEVWASYLVQPNCPSNST

SEQ ID NO: 54021 - protein, 588 aa, Oryza sativa
MAGYEREKKRLLDLAADSGFERDLAADCLDRIVRLYGEGGQGFITVENCGDDFLGALADATNNNDDWDDLNAIENEACGNLNGMMKHGVIDDKEVEVRTPLFRQAESSARQTRINLDSFGFSSDDDFETLESHCDRSVSTQKKVNRGNNRCESSTSTSNRETLSYQQLYSLDDINFANVVIFGNKSFRPLQYEACRAAVSNMDTFVLMPTGGGKSLCYQLPATLHPGVTVVVCPLLSLIEDQIVALNFKFAIPAAFLNSQQTPSQSSAVIQELRSGKPSFKLLYVTPERMAGNSSFIGILIGLHQRGLLARFVIDEAHCVSQWGHDFRPDYRGLGCLKQNFPRVPIMALTATATASVCKDVLSTLRIPNATVLKRSFDRTNLDYEVIGKTKTPQKQLGDLLKERFMNMSGIVYCLSKNECADTAKFLREKYKIKCAHYHAGLAARQRSNVQGKWHSGEVKVICATIAFGMGIDKPDVRFVIHNTMSKSIESYYQESGRAGRDNLPAHCIVLYQKKDLGRIVCMLRNSGNFKSESFKVAMEQAKKMQTYCELKTECRRQTLLGHFGEQYDRQRCKHGCSPCDNCIKIPS

SEQ ID NO: 54022 - protein, 167 aa, Oryza sativa; identical to SEQ ID NO: 36906

SEQ ID NO: 54023 - protein, 444 aa, Oryza sativa
MPTRKKGLARNATTEHINPPNSRKSSRSTQAAAAEHKVNDLITSSSKKQIGGGLLKKNRALRGGKKLNSIYDSAGTGNDVAGVPSSSFFNHKQSHENDEDRSCDSIFSPSFHNQKEDVTDCLSEGLVHEEVIHEPVQNAEYVTNSISCNTFDGLSKHSYDIHMQSACGSTLEGDEFSELGSLSPEVSAIYLAMQHSKLECIDEQSQDSTSTDGCADPDETVELDYFDPYAFIKDLPDLSLVVPKFQPVLLPKQTRSCPRTTLVLDLDETLVHSTLEPCEDSDFTFPVHFNLREHTIYVRCRPYLKEFLETVASMFEIIIFTASQSIYAEQLLNILDPKRRLFRHRVYRESCLFVEGNYLKDLSVLGRDLARVVIVDNSQQAFGFQLDNGVPIESWFDDRNDRELLTLLPFLQSLVGVEDVRPCIARKFNLREKVATAPSLSMHF

SEQ ID NO: 54024 - protein, 809 aa, Oryza sativa
MDEEEEEEMSEREVDSQVHMACVMQGRRVGIAYYDSSMHQLFVLEIWEDITEDFPLIDLVKYQSKPSTIYTSTKTDEALLLALQRNDCNDEAPAVKLMKSSTFSYEQAWHRLMYLKVAAMDEGLSVKERICFLNSMMDLGSDVQVRAAGGLLAILDNERLLDTLDQMEGGASIAIDSVAQISLDKFLKLDATAHEALQIFQVDKHPSYMGIGRAKEGFSVFGMLNKCVTPMGKHLLRTWFLRPIIDIDVINNRLNTISFFLCCEDVMSALRGTLKSVRDIPHMLKKFNSPSSFCTSSDWHAFLKCICSLLHINKIFEVGISEHLAIKLQHMNIDLVGKANSSITEELDYVSDLVVGVIDVQRGKEKGYDTLVKDGLCEELDELRMVYEELPDFLEQVSANEIASFPFSFECRKAPLIVYVHQIGYLMCFFDEKISDALLIGLPDFEFAFSEEGEERRFYYHTQKTRELDNLLGDIYHKILDMERAIIRDLVCRVCQFIPQLTKAVNFAAELDCILSLAIVARQNNYVRPILTEDSILEIQNGRHALQEMTVDTFVPNDTKIRSSGRINIITGPNYSGKSIYIKQVALVVFLAHIGSFVPADSAIVGLTDRIFCAMGSKSMTSEQSTFMIDLHQVGTMLRHATSRSLCLLDEFGKGTLTEDGIGLLGGTISHFTDYDCPPKVLLSTHLTQIFTESYLPQSEHIKCYTMSVLNPDEQTDNEDVIFLYRLVPGQALLSFGLHCAQLAGVPSEVVQRAVTVLGDIHSKRPIRRMVWEKLAAKDQQYQDAVTKLLAFDPHKGDLVNFFQEVFPS

SEQ ID NO: 54025 - protein, 364 aa, Oryza sativa
MARTSPFPPLTRRKIASLKLLIPCVLVLSVAVIVVTQYFHNISYLLRPLWDTPPKPFIRIPHYYAPNISMPQLCQLHGWGILPTPRRVFDAVLFSNELDILEIRYGELLPYVDRFVILEANATFTGIPKSLSFLENINRFAFAGSKIVYDMLPVMEMDPGSHRQPFHVEAGHRRALNMLLRRSGIAVGDVLIMADADEIPSPETVQLLKWCDGIPQVMHLELKNYMYSFEFPIDYNSWRATAHVFTEHTLYRHSRQSNLLLADAGWHCSFCFKDIKEFAFKMKAYSHADRVKQDSFLNPDRIQRVICNGEDLFDMLPEEYTFKDLFKKMGPIPKSGSAVHLPSYLIKNADKFRFLLPGGCLRPG

SEQ ID NO: 54026 - protein, 305 aa, Oryza sativa
MERGGRVRKPHTSTGDLLTWSARGPDAAAAAASPVASSRPSLKPAGGITPAMFGAPVSEKEAEDLSKSERKFCSGSKLKEMTGSGIFAENSENDDSEASNPANKTSVRMYQQTVTGISQISFSADGSVSPKKPSSLPEVAKQRELSGTLETDAEAKMNKQHSEAKSKELSGSDIFGPPPEIPARPLAARNMELQGNLDFALPQPRSVHTSVKVSNPAGGPSNITFSEEPVVKTSKKIHNQKFQELTGNNIFKEDATPASAEKSLSSAKLKEMSGSDIFADGAAAPRDYLGGVRKPPGGESSIALI

SEQ ID NO: 54027 - protein, 565 aa, Oryza sativa
MKALRRSSTSSSSSASSSPRAPSSPPPWVQLRSLLVASSSSSSSSSSLAASGNSASPAAAAAAASASFSPASYSPHSDRGGTKSPWSRRKRKRPLSCRHWNHLFSSDGKLRDGGRKFLKKVRGGGVEPEIRAKVWPFLLGVYDLNSTEAERNVIQTNKRNDYEKLRRKCHHVLHSYKGSGLNVINEAAACEYHSCNEESEPLNLESVNTRSSPSPKGLKSLRCGISRQENATEGIDEDTSELTYVDPYLAESESSDSGTSDEEDLDRMSVSANTEVNRDQGPKFVRSASSKSGFFRNNKTPEDFATWQRIIRLDAIRTDPEWALLSHNRAEVSKEKALQYARSVGLKDYDHLEPYMIYHAARLVAVLEAYALFDPEIGYCQGMSDLLSPIIVVMEEDHEAFWCFVGFMRKARHNFRLDEVGIRRQLKIVSQIIKRKDSHLYRHLQKLQAEDCFFVYRMVVVLFRRELTFEQTLCLWEVMWADQAAIRAGIGRSTWSKIRLHAHPTDDLLLYAIAACVLQKRKLIIERYSSMDEILRECNSMAGQLDVWRLLDDAHDLVVNLHDKI

SEQ ID NO: 54028 - protein, 50 aa, Oryza sativa
MFIATVILFVSVVLVGFFYYYLIELRVFVFDCLFMATRLTVYIAYALFRA

SEQ ID NO: 54029 - protein, 445 aa, Oryza sativa
MDGDDEDMRDVSSTSSSSCGGGEGAGFEEGMGEGMMVMEVRWFEVDLEYEFDAPRWFDLAVEESPVEAAAAQLWFASAPSYPPSPLIAKMLAEDLGLQSLRSTVDIDAAHCSKSSHECSNGAEQTIHRPHIPNEGRIPCHQVSANERKHGVRTIGKGTIPKRSTLMKPTASQLARQNRQIEVKNSTQSKKSVGVRSDRSTMSSNDCTYQAAKRQRLERGHLNKVVSTNQPELIHKNHAKNVMTSSSDHAIAVPKLKITIPREPELATKLRAERSRILRAVPTNSKQLNKQAAQSISMTQASSIRKVVQPSGRNDHQHASVPHRGIGSNVPVCTANRPRHLDNICKTPDECRDDLFKFKARPVDKKILGSKGDIGVFQNAKRSTTVPKEFKLSTGRKGKQAPLSELFNKLTLTTEARRALDHRTADLPNYITTKDCKENMIGNMQS

SEQ ID NO: 54030 - protein, 338 aa, Oryza sativa
MAPSKQQQMLLKKVMAKKPKTKRLSGFGLKPSAAFSRPHVPSAAASLQPSRRVRVVFEDPDATDSDSDDDEDAGAASKKRYFELFIGKPASSTKQASPASTVAAYANIGKVGSTCYRGVRLRKWGKWAAEIRNPFTGHREWLGTFDTADAASAAYQSASRNFAEEKRRRGVASSASPASSATPTPTASSSSSTSAAPFAHPSPSSVLEATKPAPKPESPPLPEQAATPLLVEAANETAELPDDPEFYKDILRGLQLPDIDPMDFRAGLDALDISDVPAYMNGEQDVLFTEDMLLGDFAEEDDLDLDDIGDDFCEDFPEIPSGYDFGRGDMFRQVDFCV

SEQ ID NO: 54031 - protein, 238 aa, Oryza sativa
MATLLRRSVGPARQLLLRPRPLPLPHAASSTRSFSRYYSRDDVSRYEALSTPVNWGVSIVPEKKAFVVERFGKYVKTLGSGIHVLVPLVDRIAYVHSLKEEAIPIPDQSAITKDNVSIQIDGVLYVKIVDPYLASYGVENPIFAVIQLAQTTMRSELGKITLDKTFEERDTLNEQIVRSINEAATDWGLKCLRYEIRDISPPRGVKVAMEMQAEAERKKRAQILESEGAMLDQANRAG

SEQ ID NO: 54032 - protein, 118 aa, Oryza sativa
MVGTTEVEGIEALVRRLRLYQPPPSPYDGASTTAAGGGGELFRPRRAAVLVCLFRRRGGDGELRVILTKRSSSLSTHSGELASFLPSSSLASPSRGVVWCGGVRWAIGRECDRSDSCG

SEQ ID NO: 54033 - protein, 789 aa, Oryza sativa
MPDLPCDGDGVCMVCRVASPPEVDLLRCSTCATPWHSPCLSEPPALADAAQWSCPDCSGDSTDAPPPAPAPLAPGSAGQLVAAIRAIECDATLSDQEKARRRQELLGGAAPAGADADDDEGDDVLEVIGKNFSCAFCMKLPERPVTTPCGHNFCLKCFQKWIHSGKRTCGKCRAQIPAKMAEQPRVNSALVSVIRMAKVSKNANSAVSAAAYHYIRNDDRPDKAFTTERAKRAGKANASSGQIFVTIPPDHFGPILAENDPKRSIGVLVGDTWEDRLECRQWGAHFPHVAGIAGQSTHGAQSVALSGGYVDDEDHGEWFLYTGSGGRDLSGNKRTNKEQSSDQKFEKLNAALRISCLKGYPVRVVRSHKEKRSSYAPEAGVRYDGVYRIEKCWRKISVQGKFKVCRYLFVRCDNEPAPWTSDIYGDRPRPLPKVDELKGATDISERKGTPSWDFDEKEGWKWVKPPPISRKPNLSGDPATDKEIRRVARRAQMSVTERLLKEFGCSICKQVMKEPLTTPCAHNFCKLCLVGTYGSQSSMRERSRGGRTLRAQKIVKKCPSCPTDICDFLENPQINREMMDLIESLQRKAVEEGDTKTSSDVSNGAESSGDDGNNEALEKGEDDSSLKDDGSLKDDGKVVKAVVVIKEEDLQPKKSKGEDEKEQGDKKMDSADVVDIAVEKKQATKRASEKAEKKQARKRKGDAVATNDGKRMKTGGDAMETAAEEDAPLSGGTPVKRNSRKSSEVDAKGGGGSPVVSSPRRVTRSNAKASGEADGSPATRTRRATRAEA

SEQ ID NO: 54034 - protein, 528 aa, Oryza sativa
METRATECRTMQLLRELQTNKLDTSSKIIYAPRQQDDIYAGIMPELPLDKLPEDILHHVYSLMPLKDAARAACVSHGFLRCWRRYPILVLNSKTIGLAKRKLSLYAEDVPLYEPALKVDDMESYAISKIDHIINNHSGIGVKVFKLQLFACPNIDAAVLGKWFVHVIKAGIKELSLEMSLCKKRTEYNFPCSILSSKAGGGTIQSLFLSSCSFHPTVALGCNISLTSLHLYEVHISGEEIGQFLSNSFALERLVISDCNDIIQFKVPCLMQQLKYLQVTKCEMLEVISIDAPKLSSFIYGDVGIQISLGDPLQVKDIRLMGYNQPNTVCFARTELPSIMPNVESLIVSSTDEMISTPMVPIKFLHLKLLEIYLAELLAFPPNYDFFSLVSFLDGSPALETFILHVKQRCERRDSILDGEHTNLRQILHPRHANLQNVTITGFNSTKSMIELTSHILENAPSLKCITLDTANFYDKNLLTMGECLPMRKGGILEARKAFDAAKRYIAGKVPAHVEYKFLEPCRKCHIGY

SEQ ID NO: 54035 - protein, 518 aa, Oryza sativa
MHLGVSLVPPLPLHFPRRAPYGFRSAAPRRIAVCPLLSVGRRRRLGAPPRAARGGGEGPEEEMRRLLELLPGELRRRVEGHPELPALVEVVMDLGRPPLARFPSGDFLLSQSPISFDDLRHATSQVGDFGADNRAGISRTLHRISAIRNRKGAIIGLTCRVGRAVPGSANLLQDLVKDGGSLLLIGPPGVGKTTVIREIARMLADDYRKRVMIVDTSNEIGGDGDIPHPGIGNARRLQVPNQDMQHKVLIEAVENHMPQAIVIDEIGTKLEAMAASTIAQRGLQLVATAHGITIENLIMNPSLDMLVGGVQSVTLGDEEANRRGVQKTVLERKGPSTFTCAAEIVSKIELRVHRSLEDTVDALLAGKMPNVEIRKVGSKGPVQEVYVQKERLDLGPSEGATQLDTDSLSNARRSLDSAFNLDPAEGHIGRSTEAEPDLNLYAYGISESTALQAIKQLELEDIVTLTYNISEADAVIALQSKLKKNTQIQAVVKSQDIPVFFHQDKLPGANQKGTSCPC

SEQ ID NO: 54036 - protein, 44 aa, Oryza sativa
MFTLRFSRYSCLALVLLKELNTANMARKLMKMGKRKRAMTSILM

SEQ ID NO: 54037 - protein, 280 aa, Oryza sativa
MACKIFEGVQMDAYLNQEQRQQFSKQISSVVWMIRVDSAAKEDDLATKDYAYVAGVCMSPVGHILTSAHVVKPGVKYVGACTSWKAGWTPLRVVKTSMAYGMCLCQLEHESRKKTDYTNLAESGLLSVYQHVYGFGHPNLFKIPCDYSFVRGSVEYPCKDISELPSLNDLDRLLYEGLQKEGLKFDRMEAIVLTPRKVKHLMWLIDSSFRPKTIYQMHQDIPLIQIKNFHVSHCGSPVFLSSGHIVGIVLFKFHEINFAVHLSAIKEFLKEFDLVSFTVK

SEQ ID NO: 54038 - protein, 502 aa, Oryza sativa
MAATRSTATAALALSRTLARRPAASSSSRRISLELSAPRGTNPFQSTAFSSTTTGDPPPPTMDSPIKVVSHIGGSGGDGGGGAIDAGRSARKPLSLWPGMYHSPVTNALWEARSSIFERMIDAGAAGKQQQQPPRTELLTKTPAGSRTSIVYKFATDDILREQYRDPWNEVRIGKLLEDLDALAGTIAVKHCSDEDSTTRPLLLVTASVDKMELKKPICVDTDLKIAGAVTYVGRSSIDIQIEVTQVDQDSDMQSDPIALTANFTFVARDSMTGKSAPVNRLSPETEKEKQLFAEREARDKLRKRKREEQKGVFENGINKLHVEAERLNSLLAEGRVFSDLPALADRDSILLKDTRLENSLICQPQQRNLHGRIFGGFLMHRAFELAFSTAYAFVGQRPCFLEVDHVDFLKPVDVGDFLRFKSCVLYTQLDNAEQPLVNVEVVAHVTRPELRKSEVSNTFHFTFTVCSDALKNGLKIRHVVPSTEEEARRILERMDAEGLFD

SEQ ID NO: 54039 - protein, 611 aa, Oryza sativa
MAASLRGLALSPPPLVAPPTCAPSRRLVPSPRSRSGYGVRVAAAADGAPRPSDPVEVVGVGSRKDAVIDFCLGSRTLSSTPIRFWTMHVVDNCTVQLIQKSHGEDVVVRDLETPLSLQPCPPAVILVASAGQDADHITAMELLSEVKSAGKLAASIFLKPFCFEGQRRQLEATDLIDKLQMCSNFHIVIEADSLLETEVETLAEALESANNAVLSTISMISIMMSGLNQTFRSSINAQIMEVHPDELGQLLRSYGEARIGFGAGYNIQSAIKQAVFHCPFLRGGIKDLNNVVFLSITSSRIFSESDMVSTLHIFRRVTGFTEDIIFSRNCEPDLEPKLIVVSFLTVRNSTDENVASVKEGFLSGLALHFPFISSLMGGDIPEQKQATLKHSYSKLPSNGLSLAEQEFSRLSSAFTNVVVNNLFPEETDIMKSERESKEKTQTQSQEAKIEPDGEISKDREREHLDSEQEHKFWSNSPGIGIAQLWAKVRMASDGGTQNNDINIITLPVGVKSPEVQCGADTRPEAHSGSSSTSAASGHAAFGVSFSDIGLEKVTEMYSSAMTFLKGGMDRSRKRGSVANRAALMLDAERELEKTWSPIVEIQFGGGIYRGR

SEQ ID NO: 54040 - protein, 44 aa, Oryza sativa
MMPLVMVKITPLVLRVESSLRHGFGFLRVKNLAGLQVLLRESPR

SEQ ID NO: 54041 - protein, 622 aa, Oryza sativa
MGAELRRDDMEVAEEDISDSQAFRFVEHVLQSVRMDPFQVDLRDKEEYDSLLSIVDSSKKRSYDDEALLVTTLKALSEAVSKIDIMYHHALLNNIFTMSIWYLNSDTRDALLSLITRLAAVADQFLRECLQMLVNNFTPPGSLTAFIGQPRWLARKKEIYSQLHESLRMISDTVPLAPRMLKDIIDRSMPKLFDNKAKMVSFVECMLGLDNDRMGDLIGALLLAKVVDLLTELDVNITWEDILQDEHNKGIFDMELEDLGEDEDSLGQEGTKALFGGNACAEKLDGLMVVFCEHLKSCKEHGRLPQEFDILKTIFRASVLRVHKSKFAQFIMFYACSLDPEICGLEFALFLSDIFIKKEEDSISRMSAVSYVGSYLSRARFISADTVVGILKRLVDWCVDYCDLQNNIRITTKPINHQIFYASCQAVMYILCFRLRSIMDYPNLKAQLFNMPFGYILTHPLEPLKVCLPSIVDEFLRQAKAARLFNASVHSEFEDALESDLSKTFGGMNRLDMFFPFDPYLLKESDRYMRPNFEYWSMVKTTYNNYNSDVDDELVDLDAPEMNVGSLDDHVEIDLNSDDDLEYSMNKMSITPNRSFFHQIMANSDTGLTMPARIRPSISPPS

SEQ ID NO: 54042 - protein, 542 aa, Oryza sativa; identical to SEQ ID NO: 43678

SEQ ID NO: 54043 - protein, 78 aa, Oryza sativa
MGCYRLSGISIHHSGTSCKWVVTGSLESAFTVQEPITFCTAKCQLLFPLLLLLKKDGYTSHRPYFILAKSFFRIFLLG

SEQ ID NO: 54044 - protein, 181 aa, Oryza sativa
MEGFLQKLKGLDAYPKVNEDFYKRTLSGGVVTVVASVVMLLLFVSETRSYFYSATETKLVVDTSRGERLRVNFDVTFPSVPCTLLSVDTMDISGEQHHDIRHDIEKRRLDAHGNVIEARKEGIGGAKIESPLQKHGGRLSKGEEYCGTCYGAEESDEQCCNSCEEVRKHIRRKDGPLQILI

SEQ ID NO: 54045 - protein, 722 aa, Oryza sativa
MGKGEIVAVLQVGGEFSTDADGLMSYSGGEAHAMLVKSDWTFSAFKHEISSTLNNIRVDQFVFKYFLPKNKKTLISISNDKDLHRMVEFHAESETTYIYVMKKKVDNRASIVVADSGTPVDTTAVVPTTQDGSKRQKICATWKNVITGVGQVFDGPKDFRDALHKYAIAHKFHYRFIKNDSSRVTAECTGEDCPWRIHASKSPAKKQFMIKKISESHTCESETVKSHRLASQRWVASVIKEKLRDSPNYRPRDIASDLQREYGLCLNYSQAWRGRSIAQKELHSTHDEVTSQLPWFCGRIMQTNPQSVATVVPMEDSKFRLFVAFHASLHGFEHGCRPLLFLDVISAKPNKQWKLLTATSVDSEGDVFPVAFAVVDDESSEHWHWFLEQLKSSVSASRAITFISNGENGLWDEVPLVFPDSHHGYCVDYLIEEFKTQLDDAWTEEARDVMVEHLKKAIYACTVDEFNQYIELIKGESDKLAEWLLEIKPERWSDAFFKGSRHGQYSCNFPSTIVEWIPTRYELSIVQLVDMIRCKLMEMMYTRRESSNAWAELLTPAANQKLQEEVSKAHTLNVIPSESNENGNVFKVCDDSVNVVNIDAWECTCRKWHISGLPCMHAIAVIERIGHCPYDYCVKYFRTECYRLTYSMSINPIPDVMLPPAILSDQSQSPVTHATPIRTRRRVGRPKEKPADPRIAIKRAVRCSRCQGYGHNKATCKVPLST

SEQ ID NO: 54046 - protein, 665 aa, Oryza sativa
MAASTMKHLVQVGEAREAAEEDGGAPSAGPAYRCAYGGGAASPPAVPGLECCWDIFRMTVERCPDNKMLGRREIVDGKAGKYTWITYKEAYDTVIKVGASIRSLGVGKGGRCGIYGANCPEWVISMQACNAHGIYCVPLYDTLGAGAVEFILCHAEVEIAFIEEKKIGEVLKTFPNATKYLKTIVSFGKVNPEQKEKVEQNGVSIYSWEEFLQLGVEEKYELPTKQKDDICTIMYTSGTTGDPKGVLISNRSIITIISAVDGFLANSKKQLREDDVYISYLPLAHIFDRVLEEVFIHHGASIGFWRGDVKLLVEDIGELKPTIFCAVPRVLDRIYGGLQDKVSTGGFLKKTLFNVAYKYKQGNMVKGSKHEEAAAMFDKLVFTKVKRGLGGRVRLILSGAAPLSNHVEEYLRVVTCSLVLQGYGLTETCAGSFVSLPNNMSMLGTVGPPVPYVEVHLESVPEMGYDALSKESPRGEICIRGDTLFSGYHKREDLTKEVLVDGWFHTGDIGEWQSDGSMKIIDRKKNIFKLSQGEYVAVENLENIFGQAPGVDSIWVYGNSFESCLVAVVNPNKQALERWAESNGVTGDFATMCEDPKAKEFILGELTKTGKEKKFKGFELIRAVHLEPVPFDMDRDLITPTYKKKRPQLLKYYQNVIDSMYKNMK

SEQ ID NO: 54047 - protein, 89 aa, Oryza sativa; identical to SEQ ID NO: 34942

SEQ ID NO: 54048 - protein, 820 aa, Oryza sativa
MARGGGGGCCPPMDLMRSEAMQLVQVIIPTESAHLTVSYLGELGLLQLKDLNADKSPFQRTYAAQIKRCGEMARKLRFFKEQMSKAGISTSAQLTEISLDFDDLEIKLGELEAELAEVNANNEKLKRTYNELLEYSTVLQKAGEFFYSAQRSAAAQQREMEANQSGESSLESPLLEQDTLTDASKQVKLGSLSGLVPKEKAMAFERILFRATRGNIFLRQESVDEPVTDPVSGEKVAKNAFVIFYSGDRAKAKILKICDAFNANRYPFPEDVARQLHAVQEVSAKISELKATIDMGLAHRDNILKNIASEFENWNRLANKEKIIYHTLNMLSVDVTKKCLVGEGWSPVFATTQIQDALQRATLDSKSQVGSIFQVLNTTESPPTYFQTNKFTSAFQEIVDAYGIAKYQEANPGVFTIVTFPFLFAVMFGDWGHGICILVSTLYLIIREKKFASQKLGDIMEMMFGGRYVIIMMALFSIYTGLIYNEFFSVPFELFGKSAYACRDPSCGDAATEGLLKVRRTYPFGVDPVWHGSRSELPFLNSLKMKMSILLGVAQMNLGIVISYFNAKFFRNSVNVWYQFIPQLIFLNSLFGYLSMLIIIKWSTGAKADLYHTMIYMFLSPTDELGENQLFPGQKTVQLVLLLLALVSVPWMLIPKPFFLKMEHERRHQGQQYAMLQSTDDSVVAEMGHHNGSNHHEEFEFSEVFVHQLIHTIEFVLGAVSNTASYLRLWALSLAHSELSSVFYDKVLLLAFGYNNILIRIAGITIFICATVGVLLVMETLSAFLHALRLHWVEFQNKFYEGDGYKFAPFSFALISEEED

SEQ ID NO: 54049 - protein, 876 aa, Oryza sativa
MSQTNWEADKMLDVYIYDYFMKRNLQATAKAFQAEGKVSSDPVAIDAPGGFLFEWWSVFWDIFIARTNEKHSDVAASYIETQHMKAREQQQQQQQQPPQQRQQQPQHIQMQQMLLQRAAQQQQQQQQQQQQQQQQQQQQQQQQQQQRRDGTHLLNGTASGLPGNNPLMRQNQSTANVMATKMYEERLKLPSQRDGLDEVSIKQRYGENAGQLLDSNEALLKASASGQSSGQILHGTVGGLSGSLQQVQSRSPQIPGPAQSIKTEMNPILTPRSAGPEGSFIGVQGSNQAGNNLTLKGWPLTGLEQLRSGLLQQKSFVQNQQQLQQQIHFLTPQQQQQLMLQAQQNMASPTSSDVDSRRLRMMLNNRNVGQTNSGGDIIPNIGSPSLSGGDVDILIKKKIAQQQQLLQQQSNSQQHPQLQQPAVSSQQSQSSNQFLQQEKPGIGTMPVDGGMPNSFGGVDQTTKKRKKPGSSSGRANSSGTANTAGPSPSSAPSTPSTHTPGDAMSMPQLQQNGGSAKPLVMFGSDGAGSLTSPANALADVDRLLEDGSLDENVESFLSQDDMDPRDSLGRSMDASKGFGFAEVAKARASATKVTCCHFSSDGKLLATGGHDKKVLLWCTEPALKPTSSLEEHSALITDVRFSPSMSRLATSSFDKTVRVWDADNTSYSLRTFTGHSASVMSLDFHPNKEDMICSCDGDGEVRSWSINNGSCLTFVKVFKGGATQMRFQPQKGKYLAAASEKAIYILDGETQLACRNPMQGHTKNIHSLCWDSTGDNLASVSEDSVRIWSFAPGHDGEFVNELSCSGNKFQSCVFHPSYPYLLVIGCYESLELWDIREKNAMTVHSAHDGLVAALAASSATGKVASVSHDRFVKLWK

SEQ ID NO: 54050 - protein, 417 aa, Oryza sativa
MQHKWKVVEGGAGAGAGGGGGDQRRRCVTASLSMLIAATLAFLAYVAFFPYDGAGGLYRWWRCEGCGDAAGGFAFDEAAMAQGPTAGGARRRSPTTLSHIVFGVGASARTWDKRRGYAELWWRPGEMRGHVWLDEQPVGPWPAATCPPYRVSADASRFGDRASASRMARIVADSFLAVTAEMANGTTDSPEARWFVMGDDDTVFFPDNLVAVLNKYDHEEMYYVGAPSESVEQDVMHSYGMAFGGGGSPSATRPPPSSPRPSTVASNDTGCSTAAISACKPASASSASLSPASPDSTRWTSAATRTGCWPPTRWRRWCRSTTSTTSSPSAPGGSMAARWTRRGGWCARRGSTRRGRCSRRSATSAGRATPGPCRCRGVTRCSCTRGPWRLTSWRCRSGRSRRGGRGPMARSSSTRGR

SEQ ID NO: 54051 - protein, 483 aa, Oryza sativa
MSILLWLSHVLLKLHYLRLYSCASSCTPVSILYGTNKKLKCLGDRFGEMEGSNPPGNMTQGPSYGSLDLHGISKQMHPPNSGNQGFNQPQIPGNFTIPMDRVTEPDNISDGVQLGQHGKIAHHHHHHRHHSKNHGSDEEEHDMNEDAADGKDKKGSPWHRMKWTDSMVKLLITAVSYTGEDPGADLGGGRRNYSMMQKKGKWKAISKVMGERGCHVSPQQCEDKFNDLNKRYKRLTDILGRGTACNVVENHSLLDHMDISEKMKEDARKILNSKHLFYEEMCSYHNNNRISLPEDPALQQSLQLALRCKEDNDFMRHASGDAELDDDQSEDSDYEENEEEHRAVDTNIRGPSMHKRMWHVVDHGDVGFVTSCSNDGSGRSDPYDVLDINKPFPDGCDLALVQKDLALKAAEIQKHRLQIETKAVQLAKQRLKWEMFRKNKDLELEKLALENEQMMLQNKRFELDLRHKELELEIKIKGNANHP

SEQ ID NO: 54052 - protein, 302 aa, Oryza sativa
MSKLQLRPPLLATLHCSLLVLLIINGAAAAGKTGELTVIWGRNKDEGSLRSTCDTGLYTTVVISFLTVFGHGRYRTDLAGHPLAGVGADVKHCQKAKNVTVLLSIGGAGDQYSLPTAKSAQDVAEHLWHAYLGGGRRGVSRPFGDAVLDGVDVYVDRGRWGHYDELARRLRSFGREKPAVRLTASPACSLALFDDEVETMKTLSLFERLHVRFYNESSCDYNYFETRPFWGAWRTWTSRFPAARVQVGWPAMEEMSGFVDPQTLRESVLSSVQDDANYGGVMLWDRYYDKITGFGRAIKDIV

SEQ ID NO: 54053 - protein, 567 aa, Oryza sativa
MRGAVAVKAGSRPPWVGLGAAVWVQVAGGASSTFALYSHALKVALAADQRRLALLGVACDVGENLGLLPGVLCNRLHPALLLLVGAAACLLGYGSTWLAVSASGPALPYWLIWFALCLAANSGAWLGTAVLVTNMRNFPLSRGAVAGILKGYAGLSAAVYTVIYTGVLHDSASNFLLFVTLGVPVVCLVTMYFVRPCEPSLVENSSEQVHFLFTQLSSVLLGVYLVAATILDHFVTLTDAVNYVLLVIMVLVLFVPLTVPLKMTLFPSNRRKGQSDSSECSSSSADHDHTESLLPSSSASNLGNIEDDDSMDIDILLAEGEGAIKQKRRRPKRGEDFRFREALLKADFWLLFAVYFIGVGSGVTVLNNLAQVGIAAGVADTTISLALFSFGNFFGRLGGGAVSEYLVRSRTLPRTTLITCTQVMMIIIYLLFALGHHATLHVSVALLGICYGAQFSVMVSTSSELFGLKHFGKIFNFISLGNPLGALLFNSLAGYVYDQEVERQHATTMDTDIACHGPNCFRLTFCVLAGVASLGTLLSIVLTVRIRPVYQMLYAGGSFSQPRSSAH

SEQ ID NO: 54054 - protein, 351 aa, Oryza sativa
MDMETEKQQQQTRCPPWLQAAIADIEQRVRALAVSVPEDAAATATDHSFAERAENYYHKRPQLLALLTDLHHRYLYLADRYSQSLLAANKPFHAAAASSDCGSSDVDDRSSDTGSSLSFQPPPTTSSSVRDAVDAELVVAELVAAWIDREILADEAERRKAESARKIELQGSLVEVLESERLVLLGENARVGFRASAAEEEAAAAAAELGYMRRRAAEMARLVVKLREDHRVCMLGRKIEALQSQVYGLELRNRECYEAMAAWEAERKVGLAEIERLRADNKRLAAEAAMAAAARRKRKGGNGSGWLWWARVRMAAEWTPCAPAVRKVGERIKHGGGRKDVKYNAGGCFCL

SEQ ID NO: 54055 - protein, 473 aa, Oryza sativa
MPAWCSKGSGAMARGRGRWLLPTRLLNVCLAALCRGGSLAAAESVLVDAIRLGLPPDVVTYNTLLAAHCRAAGLEAGLVVMGRMREAGVEPDAVTYNSLIAGAARRGLPIHALDLFDEMLRSGIAPDSWSYNPLMHCLFRSGHPEDAYRVFADMAEKGIAPCDTTYNTLLDGMFRAGYAMNAYRMFRYLQRAGLPVSIVTYNTMINGLCSSGKVGYARMVLRELGRTDHAPNIITYTAVMKCCFKYGRFEQGLDTFLSLLDRGYISDVYPYCTVISALVKKGRLGEANNYCDLMLQNGSRLDSVCYNTLIHMRCQEGKLDDAFELVSMMEDGGLESDEYTFAILVNGLCKMGHIEAAEKQLFYMEIKGMQSNVVAYNCLVDALCKFQEVDAAIRLLQCMKLKDDFTYTSLVHGLCRVGRYHMASKFLRICLHEGNNVLASAKRAVIAGLRSSGFKNDLRKVRVALNMAKLLRP

SEQ ID NO: 54056 - protein, 355 aa, Oryza sativa
MKFKAFFTDDGIALLDKRFLPAMDKVGRLCHVYLTPTHAMLLHNLLGPTGTGPDGGGPQCVAQFAKDLLFREYSVSSRNGNRVAFAVDVALLHRALRSALAVHAQSPAAGDASAAIQVKLVNKLPAGSRSASPFLTFETKGARSAVVQDVPISRPLSRSDVERLQAALDSAQELPQTLVQVPDLPQLQSLVDRLKNVGDLLTVAVTQYGDLHLHVATSLVTVGSEFRKLRILGVRATAPVGDQNLSASTRTNMAIERGEALSVQVNMKHLAKSLQCHLAKPDCTFYGISPGGACLTVIFQYFIPGTRLTDKSISFYCRLPVLDPGSLNILQRGWMCTWCRRHSRWCQCRRSRGDR

SEQ ID NO: 54057 - protein, 465 aa, Oryza sativa
MGCFGRVRDMIKKRKGKKRPPPHEGPAPPPPPPSALAGSSHSTSTVSSSAVATSQSTEDSSAAAARPAAGWSRSSGSVSSARSIPELYEERGASSLQEFGLRELQAATRDFSRLLKIGEGGFGSVYKGVVRLPGGPAGGTEVAIKKLNPNSRQGHKQWLTEVQFLGVVEHPNLVKLIGYCAAQSERGPQRLLVYEFMSNKTLDDHLFNKAYPVLPWDIRLKIALGAAEGLLYLHEGLEVQVIYRDFKASNVLLDEEFRPKLSDFGLAREGPTADNTHVSTAVMGTYGYAAPDYVETGHLTNKSDVWSFGVVLYEILTGRRSMERNRPKNEQKLLEWVRQYPVETKRFSRIIDIRLRHNYSKQGTREIAKLANSCLAKHAKDRPTMREVVESIKQVMQHNELDGDVEASGESSPPHEVPGKPTADDVAVAAARRRMLHLAALGENANNIARRRFMLMRAAAAPTPT

SEQ ID NO: 54058 - protein, 704 aa, Oryza sativa
MSRRIMNRESFNPPSLPNLAASRCWPESVILANRAYIADCKNPTTATAQSRDGHTVQISFCFAEAPVISYFCAHCYNPRVKVEFFTEPIIVAGEGAFVVLRVHLSSPLLSEFFIYRAGPGLPSLERVQDPTGYNSPIFYLSLLGIASCDNDDGGSCLLVGFRNRLTHYEVYVYTSTTKTWSTRKLDLSPGIRAIRPQKVINLGRGLLGWVDLWHGILIFNARDEQPQIQYVPLPEPMPLNKESFRPSNRSESCPMLFRDVICSSSGEIKFVELEQRQRKIQPIPQELEDVRQESKEDVCDRDVLDDSYLMSCAHMDDLPKEETPSFVGDGWRAVTWSRLISSNCWQKGYVIDSDDMQSTYEVLTSTQRDKGVEMLRFRDLFSVFPTLSLNGAGDLLYLKSTVKFKDLNGWVSSIDIGKKTIKVLKPYCNGRHIPFVQMFRSCVLCHHLTVLPGPENIGRFIETSSNENHPKTIAASIMPESNCLAGNKRSRSATRWSPALRGWPSARVAKPALSWRSCPPSLSPVSSTYGLRNTAGYHMAQTCCFENDPRATANTTPRHPENQFTQHGYEQRENDFILSAPNFVRWHRPPFSAGGTLPPPPPTQQPSAFGTLPPPRPSQQFSACGTMLPPSSSQPFCPSVRSLAMQTFATPGPILPGPPVTPMQWPVFISPPQQQLSACAVWPQAGTLQQELPPHIPFRAHQCP

SEQ ID NO: 54059 - protein, 541 aa, Oryza sativa
MAAAAAAASTSRLLLLRHHHHAAADGSKQQQQLRYSSKPSSLALPRLRLLPAAGALLPDRVTPFSYEEDDESDDHPREECGLVGVVGDPDASSLCYLGLQKLQHRGEEGAGIVAVGGDGKLKSVTGLGLVADVFGDPARLASLPGPAAIGHVRYSTAGAAASLRNVQPFLAGYRFGQVAVAHNGNLVNYQALRNKLEARGSIFNTSSDTEVILHLIATSLSRPLLSRICDACERLAGAYSLLFLTADKMFAVRDPHGFRPLVLGRRRNGTVAFASETCALDLIEATYEREVEPGEVVVVDRRDMSVSSACLVPHRPRRSCVFEHIYFALPNSVVFSHAVHERRTAFGRALAEESPAAGADVVIPVPDSGFYAALGFARASGLEFQQGLIRWHYSGRSFIQPTQAIRDLAVKLKLAPVHGVIRGKSVVVVDDSLVRGTTSSKIVRLLRDAGAREVHMRIASPPVVGSCLYGIDTPSEGELISNRMDLEGVRREIGSDSLAFLSLGKLHSIYGAEAEGYCDACFSRNYPVLPTLPEPVVELEE

SEQ ID NO: 54060 - protein, 196 aa, Oryza sativa
MDAASRPAVVIDNGTGYTKMGFAGNVEPCFITPTVVAVNDTFAGQTRANTTKGNWMAQHSAGVMADLDFFIGEDALARSRSSNTYNLSYPIHNGQVENWDTMERFWQQCIFNYLRCDPEDHYFLLTESPLTPPETREYTGEIMFETFNVPGLYIACQPVLALAAGYTTTKCEMTGVVVDVGDGATHIVPVADGYVI

SEQ ID NO: 54061 - protein, 600 aa, Oryza sativa; identical to SEQ ID NO: 38563

SEQ ID NO: 54062 - protein, 696 aa, Oryza sativa
MLLGALRMEERKGLMGRERDQFPVGMRVLAVDDDPVCLKVLETLLRRCQYHVTSTNQAITALKLLRENRDMFDLVISDVHMPDMDGFKLLELVGLEMDLPVIMLSVNGETKTVMKGITHGACDYLLKPVRIEELRNIWQHVVRRKFGNRERNNLDFSKECNKPQSADTDHGPYQPTCGSSDQNGRSSRKRKELHGEDDDEGDDNDYQENDEPSAAKKPRVVWSVELHRKFVAAVNQLGIDKAVPKRILELMNVEKLTRENVASHLQKYRLYLKRLGAVASQQASIVAAFGGRDPSFLHIGAFEGLQSYQPFAPSAALPSFNPHGLLTRTSAAAAFGLQELAAPSSTIQTSTGNVTVGHCLEENQQANLAQGLTAAIGQPQLQQNWIHQEGNGLSDVFSGSSLTNTLSSTLQRVPSSSLPPQELLECKQAKVSMPPSIRIPPSSSALLERTLGVSTNLGDSSISQQGALPIDGGFSADRLPLHSSFDGAVATKLDTSLAASQREIGQQGKFSVSMLVSPSDNLALAKNAKTGASSSGSTIILPLDTARHSDYLQFGGASNSLQKMDGQKQDHIQSSNIIWSSMPSTQLPSDTQIHNTQNQRLDSGSFNHNIGAHLADQTNASASILPQMKFDTRISEEKMKQKNTYDLGSSKLQGGFNSSGCNFDGLLNSIIKVEKDDLQFMDNELGCDLFPLGACI

SEQ ID NO: 54063 - protein, 843 aa, Oryza sativa
MVKFTVEELRRIMDKKNNIRNMSVIAHVDHGKSTLTDSLVAAAGIIAQEVAGDVRMTDTRADEAERGITIKSTGISLFYEMSDESLKLYKGERDGNEYLINLIDSPGHVDFSSEVTAALRITDGALVVVDCIEGVCVQTETVLRQALGERIRPVLTVNKMDRCFLELQVEGEEAYQTFSRVIENANVIMATYEDTLLGDVQVYPEKGTVAFSAGLHGWAFTLSSFAKMYASKFGVDESKMMERLWGENFFDPATKKWTNKSTGSATCKRGFVQFCYEPIKQIINTCMNDQKDKLWPMLQKLGVVMKADEKDLMGKALMKRVMQTWLPASNALLEMMIYHLPSPSKAQKYRVENLYEGPLDDVYATAIRNCDPEGPLMLYVSKMIPASDKGRFFAFGRVFSGRVATGMKVRIMGPNYVPGQKKDLYVKSVQRTVIWMGKKQESVEDVPCGNTVAMVGLDQFITKNATLTNEKEADACPIRAMKFSVSPVVRVAVQCKVASDLPKLVEGLKRLAKSDPMVLCTIEESGEHIIAGAGELHLEICLKDLQEDFMGGAEIIVSPPVVSFRETVLEKSCRTVMSKSPNKHNRLYMEARPLEEGLAEAIDDGRIGPRDDPKVRSKILSEEFGWDKDLAKKIWCFGPETTGPNMVVDMCKGVQYLNEIKDSVVAGFQWASKEGALAEENMRGICFEVCDVVLHADAIHRGGGQVIPTARRVIYASQLTAKPRLLEPVYLVEIQAPENALGGIYGVLNQKRGHVFEEMQRPGTPLYNIKAYLPVIESFGFSSQLRAATSGQAFPQCVFDHWDMMTSDPLEVSSQANQLVLDIRKRKGLKEQMTPLSDFEDKL

SEQ ID NO: 54064 - protein, 934 aa, Oryza sativa
MRGVQDRKQKKKQDLQVLGPFPGCLGRMINMFDLSNGVVATKMLTEKAHRDVSPAGKDRGNAFKMAIGPFSSQIEDKKRDSQPRKQSPTKRLSSPTKRSGEAPVKLLMEQDMWKEGMSGEEPLNVVARLMGLNDAAGHQSDLKSGKRSDKEYRSGGFDENSRNLRPKKDSKGHPNQKAGTHSEPCSGFSDQTLRMNSSRNKHQGKEPSCEKRMTLVREKFAEAKRLATDEKLLHTKEFQEALQFLSSNKDLFLKFLDEPNPLLSHNNYEFQPDTPPSETKQITILKPSDSIKRNGNTLVGRQLYSDGDESEGNRCRRHQSLSVSPTNSTLSEPTRIVVLKPGLVKSQEPKILRSPSSSSTAADSEDDSMSAVDETVPSSRRLAKEITWQMRMRLKDKQDEENLLSYEFHDIYIGDDSFSKSEVENAKEVSGEISEDLEFGTPTSGRSWDFLSRSGSPYSASCSSQTSHRREPSVVREAKKRIFERLSIVSSTVGGEEEREARRSMGTLGEMLTIPEVKKDQEVFGGVTLENPSPEMDSEEPFLCLPRSRSVPISLSFGGTELNGVATGCQEAEKEKNRKSLSFREKVSSLFSKNRKVARGKLDPSGIPSTDDRLKHGNSATVNDFSENADHSALDNPLNCTIQNVDDISMPRLMASSWHMNDMENMPAKDISSIPVIGAPGIFGESQDQPSPVSVLDGPFLSDNSRSLLCSSESFITASPQALSRSPLIGSFSRSLSWEDPPLEVMSPNSLRLSRLFSKADEDQDSLTFIQKLVCSAGIDREGCMLSGPLELYLLEKFSDYQEEGTKLRERRSKEKFLFDAVNEALTELTWTAELMAYPLGRSSSLERKDCENAFSNSAADEIWRVIRNWSILDKYPPGETIERNLLVEMILKREVLEAASSDTTRLETFELTSMVCTMVLEDLIADAVVDLSA

SEQ ID NO: 54065 - protein, 425 aa, Oryza sativa
MASELTYRGGAGAPGSASDGGEYSPKPSKPLSWLTRAARYAAAEHRPAFALAGMLLAAALFSLYAPSSDASSSAATTTTTTFSHLSSLPSSSAASLHESAGGKVPLGLRRRALRVLVTGGAGFVGSHLVDRLVERGDSVIVVDNFFTGRKDNVAHHLANPRFEVIRHDVVEPILLEVDQIYHLACPASPVHYKYNPIKTIKTNVVGTLNMLGLAKRIGAKFLLTSTSEVYGDPLQHPQVETYWGNVNPIGVRSCYDEGKRTAETLTMDYHRGANLEVRIARIFNTYGPRMCIDDGRVVSNFVAQALRKEPLTVYGDGKQTRSFQYVSDLVEGLMSLMEGEHIGPFNLGNPGEFTMLELAKVVQDTIDPNARIEFRPNTADDPHKRKPDITRAKELLGWEPKVPLREGLPLMVTDFRKRIFGDQEA

SEQ ID NO: 54066 - protein, 599 aa, Oryza sativa
MRKCTGVLLILTLAVLLLLLSPSPSTAPPPAATAAGGPAARLLPTLPGLSRLYPPPANSTAHHSWRLLRPLLLRSDALPGTAAGVLEAADAWRNLTLAVAASAAGGKDGRRQGDLDVSCRSSVEGDLGGVGARGVKIPCGLAEGSAVTVVGVPKPGAAWFRVEMVGGGGEVVVSVNVSLGVAEMVVEQSSWTREEGWGLSERCPPVGDADRNSSSLLSLVDGLVRCNQQAGVSGLQGRNNTMANVTANEHENEKRPKGRANFGGSFSIIEGEPFTATLWAGAEGFHMTVNGRHDTSFAYRERLEPWSVAEVKVSGDLELLSVLANGLPVSEEVDMASVELMKAPPLSKKRIFLLIGVFSTGNNFKRRMALRRTWMQYEAVRLGEVAVRFFTGLHKNEQVNMEILKEAQMYGDIQFMPFVDYYTLITLKTIAICMFGTKVVPAKYIMKTDDDAFVRIDEVISSLKKSDPHGLLYGLISFQSSPHRNKDSKWFISPKEWPVEAYPPWAHGPGYIVSRDIAKFIVHGHQERTLQLFKLEDVAMGIWIQQYKNSGQKVNYVNDDRFYSEGCDSDYVLAHYQSPRLMMCLWEKLQKEYQPVCCE

SEQ ID NO: 54067 - protein, 541 aa, Oryza sativa
MARQEQQQHLQVLSTLDAAKTQWYHFTAIVVAGMGFFTDAYDLFCISLVTKLLGRIYYTDLAKENPGSLPPNVAAAVNGVAFCGTLAGQLFFGWLGDKLGRKSVYGMTLLMMVICSIASGLSFSHTPTSVMATLCFFRFWLGFGIGGDYPLSATIMSEYANKKTRGAFIAAVFAMQGFGILAGGIVTLIISSAFRAGFPAPAYQDDRAGSTVRQADYVWRIILMLGAMPALLTYYWRMKMPETARYTALVAKNAKQAAADMSKVLQVEIQEEQDKLEQMVTRNSSSFGLFSRQFARRHGLHLVGTATTWFLLDIAFYSQNLFQKDIFTSINWIPKAKTMSALEEVFRIARAQTLIALCGTVPGYWFTVFLIDIVGRFAIQLLGFFMMTVFMLGLAVPYHHWTTKGNHIGFVVMYAFTFFFANFGPNSTTFIVPAEIFPARLRSTCHGISAAAGKAGAIIGSFGFLYAAQDPHKPDAGYKPGIGVRNSLFVLAGCNLLGFICTFLVPESKGKSLEEMSGEAEDDDDEVAAAGGGAAVRPQTA

SEQ ID NO: 54068 - protein, 510 aa, Oryza sativa
MVLSHGVSGSDESVHSTFASRYVRTSLPRFRMPEQSIPKEAAYQIINDELMLDGNPRLNLASFVTTWMEPECDKLIQASVNKNYVDMDEYPVTTELQNRCVNMIAHLFNAPLGDSETAVGVGTVGSSEAIMLAGLAFKRRWQNKMKAAGKPCDKPNIVTGANVQVCWEKFARYFEVELKEVELSDGYYVMDPAKAVDMVDENTICVAAILGSTLNGEFEDVKLLNDLLTKKNAETGWDTPIHVDAASGGFIAPFLYPELEWDFRLPLVKSINVSGHKYGLVYAGIGWCIWRSKEDLPEELIFHINYLGADRPTFTLNFSKGSSQVIAQYYQLIRLGFEGYKNIMENCQENAMVLKQGLEKTGRFNIVSKDNGVPLVAFSLKDSARHNEFEISDFLRRFGWIVPAYTMPPDAQHVTVLRVVIREDFSRTLAERLVLDVEKVLHELDALPARVVANGGDAAAASASEREMEKQREVISLWKRAVLPRRRPTASAKASQLRSGDRILLLWSTS

SEQ ID NO: 54069 - protein, 317 aa, Oryza sativa
MPTPPSPCLFFLFLLFFMWSSHSHLGAASDADALLALKSALDRSDRLPWRRDTAPALCSSWLGVRQCSQPPRDRRVTKLVLENLNLTGVLTATLLAPLSELRVLSLKSNALTGPIPDALPAALPNLKLLYLSANRLQGRIPPTLALLHRATVLVLSSNLLHGAEGLLPGQGGATPRLRLLPQWQPLLPPPRVQQPDVEQGEAPALDVVHEDRGGCRRRAGAPAPVAAGWHRARQPQALQRPPRPRLRIVPHRLRSGAHAAPLPRRSRLLHVRPIPSAGNSHRPCLHAGVRRVQLRRAPPGAAHREGAVPGPDGDAQR

SEQ ID NO: 54070 - protein, 425 aa, Oryza sativa
MEKMQKTQSRKSSSWWWDSHISPKSSKWLSDNLEVMETQIKETLELIEEGEPSAEKAGVLITHVQNFQQMYRVLAKRYGNVTGELRKNIPSSLQSSVSFGISESDSEAQSPSSPERDLQEKMSQKQKPRSDCFDVSIGSGMSSDVSKKGSDGSSSSSESDLELDEAKEENGNSIFYALSQKIIELEDELHEVRGKLDASEEKNMRCHCNFGANSELSEHEEKQQVSDVETSSLQKDLDEVKSEKEALEAVVLVNKDEIDRLKESMVSAAKQFEVELAHRDTEIDKCKQELEVLSEKYLHDISALEAEIGKLQGVIKTFEDDFAKISQEKLMLESRVEELEQSVNSSNYSVSEMVNLQELMKDTQAELEKVSQEKEVLRERVLEFEQLLGDFENSGMEVAKLPETIKNLGAQIEGTLQEISTPGQD

SEQ ID NO: 54071 - protein, 706 aa, Oryza sativa
MEAQADAGGDDLAAMREQCRSLEEAIGFRRETQMGLVASLQRLVPDLVPSLDRSLRIIAAFNDRPFVPTPNPDGGHGKSPAALKPHHRRALPDPARSTRRKTSPGSSPASVAAAPGGLDAVRTMVAVCLLELVPFAEIDAAALARRLQAESSSASEAERTALADLAAELGGSAASAVVLALRRIAEDTGGVQIEEAMIGGKSMTMVWAIDRNKLLKELPESATLPLLQPPPAPQMPPSETDAGSAMIPRTPQQQQPQPDMWPHSMPPIFPRPRGMTMQGMQRVPGVPPGLMPLQRPFMGPAGVITMGGGVGPSPNQQKQKSEEDELKDLELLLNKKTYREKQNTKTGEELLDLIHRPTAKETAVAAKFKTKGGSQLKEYCTNLTKEDCRRQSGSFVACDKVHFRRIIAPHTDTNLGDCSFLDTCRHTKTCKYVHYELDQTPDIPPMMAGALAPPRQIRLQRAEYCSEVELGEAQWINCDIRNFRMDILGQFGVIMADPPWDIHIELPYGTMANDEMRTLNVPALQTDGLIFLWVTGRAMELGRECLELWGYKRVEEIIWVKTNQLQRIIRTGRTGHWLNHSKEHCLVGIKGNPLVNRNIDTDVIVAEVRETSRRPDEMYPMLERISPRTRKLELFARMHNAHAGWLSLGNQLNGVRLVDEGLRARYKAAYPDSEVQPPSPPRASAPIDGDQGTSQKPTVSDGERPA

SEQ ID NO: 54072 - protein, 525 aa, Oryza sativa
MVQNFPEDDMAGTPYSDQTSPILTEYHITVPALHDGSMQGSVHHERRLLDCLRATPSVEWLKNINLCSPLTNFRLPSTGVRRYLHVEVHFVRRINWSSVFSFCKNWLKHPLNIALLAWLLCVAAAGGMLILLLLGLLNRAFPSKPLRHHWIEIDNQILNALFTLMSIYQHPSLIHHLVLLCRWRPEDAAELRKVYCKNGDRRPGERAHMSVVVALLHVTCISQYVVCNLYWAYRSRSRSEFADNFFFVLGVVAPVVAGAYTVYSPLGRDTDDDASGEEAKQQQQHMIEAELPGTRTVVVDPVWAGGLLDCGEDPAACCLSSLCTFCVFGWNMERLGFGNMYVHTAMFLLLCVAPFWVFNITALHIHDYDLSDAVGAAGIALCFLGLLYGGFWRVQMRKRFALPGSRWCCGSASLTDYARWLFCWPCALAQEVRTGNLYDVEDGGGVFYEKAMDGGDVEGGAASTAATGVVPVSVGGGEGDGVVGDIKLGMDGEMIPPAQAVMETSGDTQGSGADVAANGDNELSS

SEQ ID NO: 54073 - protein, 548 aa, Oryza sativa; identical to SEQ ID NO: 52910

SEQ ID NO: 54074 - protein, 261 aa, Oryza sativa
MGDPPALKRPKLEKDDYGSAYWPRPAASNASSASKPPQSSSSATATAATQGDEEDDIAEEAVLALIAHRERDVERCKLKLSHYQSLLDTAEKKLAEAQDRLARYRDRKPPPPPTHRDPKPSLPPTTTQRDPKPSPPQHKAPERPQLVIPGANNRPPPRPEPMPGLKKTAAPSSSSASVPPERPRALEKKPKLKIEQKEHQNLIQSVKKSSATVLRFYGGTVICSQHKRKLRCLELCPVNDQLVATSALDGIVTLWQVQPKG

SEQ ID NO: 54075 - protein, 635 aa, Oryza sativa
MKREYEEFKVRINALVAKAQKVPEEGWTMQDGTPWPGNNVRDHPGMIQVFLGQSGGHDVEGNELPRLVYVSREKRPGYNHHKKAGAMNALVRVSAVLTNAPYMLNLDCDHYINNSKAIKEAMCFMMDPLVGKKVCYVQFPQRFDGIDRHDRYANRNVVFFDINMKGLDGIQGPIYVGTGCVFRRQALYGYDAPKSKKPPSRTCNCWPKWCICCCCFGNRTNKKKTAKPKTEKKKRLFFKRAENQSPAYALGEIDEGAPGAENEKAGIVNQQKLEKKFGQSSVFVASTLLENGGTLKSASPASLLKEAIHVISCGYEDKTDWGKEIGWIYGSVTEDILTGFKMHCHGWRSIYCIPKRAAFKGSAPLNLSDRLHQVLRWALGSIEIFFSNHCPLWYGYGGGLKCLERFSYINSIVYPWTSIPLLAYCTLPAICLLTGKFITPELTNIASLWFMSLFICIFATGILEMRWSGVGIDDWWRNEQFWVIGGVSSHLFAVFQGLLKVIAGIDTSFTVTSKGGDDEEFSELYTFKWTTLLIPPTTLLLLNFIGVVAGVSNAINNGYESWGPLFGKLFFAFWVIVHLYPFLKGLVGRQNRTPTIVIVWSILLASIFSLLWVRIDPFLAKNDGPLLEECGLDCN

SEQ ID NO: 54076 - protein, 79 aa, Oryza sativa
MLIEQENSLALSVCYASQLGCSLHPENRPPYTVLLSVYIQLDVEAGFNPFSKNTVPFGGVHLEQNRFIFLLFKLLLLIP

SEQ ID NO: 54077 - protein, 535 aa, Oryza sativa
MAAASSAPFFGLGDTQMPPPQNPTNPALHHHPNPSPAPVAAAAPAPKKKRNQPGNPNPDAEVIALSPRTLMATNRFVCEVCNKGFQREQNLQLHRRGHNLPWKLKQKNPKEARRRVYLCPEPSCVHHDPSRALGDLTGIKKHYCRKHGEKKWRCDKCSKRYAVQSDWKAHSKTCGTREYRCDCGTLFSRRDSFITHRAFCDALAQENARMPPIGAGVYGGAGNMTLGLTGMAAPQLPAGFPDQAGQPSASAGDVLRLGGGSNGASQFDHLMASSSGSSMFRSQGSSSSSFYLANGAAHHAPAQDFGPEDGQSQAGQGSLLHGKPAAFHDLMQLPVQHQQSGNGNLLNLGFFSGSNGGVDQFNGGAGNGGQGSIVTSSGLAGNHGGGGGGFPSLYNSSEPAGTLPQMSATALLQKAAQMGATTSSYNAGGAGGASSLLRGASSHGISVGEGPANERSSYQNLIMGSMASGGGGAGFAGSFSGASGFGGAVDDGKLSTRDFLGVGVVQGISGSAAMGPPRHGAAGLHVGSLDPANMN

SEQ ID NO: 54078 - protein, 302 aa, Oryza sativa
MAAAEAAAAVGKQQQKGGGGRGGGGGGPAPFLTKTNQMVEESATDEVISWGREGRSFVVWKPVEFARDLLPLHFKHCNFSSFVRQLNTYGFRRVVPDRWEFANGNFRRGEQGLLSGIRRRKATTPQSSKSCGSGVNVAFPPPLPPLPPEPSATTSSGNDRSSSSASSPPRADITSENEQLRKDNQTLTMELARARRHCEELLGFLSRFLDVRQLDLRLLMQEDMRAAAGGVGGEQRVQEHAREEKCVELFGVLLDDTHGAATRKRARCEEAAASERPIKMIRIGEPWVSVPSSGPARCGGDN

SEQ ID NO: 54079 - protein, 624 aa, Oryza sativa
MEKMQKTQSRKSSSWWWDSHISPKSSKWLSDNLEVMETQIKETLELIEEGEPSAEKAGVLITHVQNFQQMYRVLAKRYGNVTGELRKNIPSSLQSSVSFGISESDSEAQSPSSPERDLQEKMSQKQKPRSDCFDVSIGSGMSSDVSKKGSDGSSSSSESDLELDEAKEENGNSIFYALSQKIIELEDELHEVRGKLDASEEKNMRCHCNFGANSELSEHEEKQQVSDVETSSLQKDLDEVKSEKEALEAVVLVNKDEIDRLKESMVSAAKQFEVELAHRDTEIDKCKQELEVLSEKYLHDISALEAEIGKLQGVIKTFEDDFAKISQEKLMLESRVEELEQSVNSSNYSVSEMVNLQELMKDTQAELEKVSQEKEVLRERVLEFEQLLGDFENSGMEVAKLPETIKNLGAQIEGTLQEKSVLQDRIKELEQAVHDSLQNHSLEKSSLSAELSKLSEANASLEAKLASVEAELKQVYDEKANESLNSEKEISRLNQELANVKTDLELLLSEKSLVDNKVTTLLTDITTRDEKMKQMDDQLNQLQLEHSKLMAQADLARKSLSELHARVCELEKEVEMQKLVISESAEGKREAIRQLCFSLEHYRSGYQELRQLLHDQKRPLVMAT

SEQ ID NO: 54080 - protein, 129 aa, Oryza sativa; identical to SEQ ID NO: 38669

SEQ ID NO: 54081 - protein, 494 aa, Oryza sativa
MAARGACDPPGPGASLRRLVLLLALSVSALAAADASGVFEVQRKFTRHGDGGEGHLSALREHDGRRHGRLLAAIDLPLGGSGLATETGLYFTRIGIGTPAKRYYVQVDTGRDILWVNCVSCDGCPRKSNLGIELTMYDPRGSQSGELVTCDQQFCVANYGGVLPSCTSTSPCEYSISYGDGSSTAGFFVTDFLQYNQVSGDGQTTPANASVSFGCGAKLGGDLGSSNLALDGILGFGQSNSSMLSQLAAAGKVRKMFAHCLDTVNGGGIFAIGNVVQPKVKTTPLVPDMPHYNVILKGIDVGGTALGLPTNIFDSGNSKGTIIDSGTTLAYVPEGVYKALFAMVFDKHQDISVQTLQDFSCFQYSGSVDDGFPEVTFHFEGDVSLIVSPHDYLFQNGKNLYCMGFQNGGVQTKDGKDMVLLGDLVLSNKLVLYDLENQAIGWADYNCSSSIKISDDKGSTYTVNADDISSGCEVQWRKSLILLLATTVISYLML

SEQ ID NO: 54082 - protein, 102 aa, Oryza sativa
MRTTGRRSSPPVAAALALLLLLVLFFFSHCASAARPLPASAAAELVLQDGATGNGDEVSELMGAAEEEAAGLCEEGNEECVERRMLRDAHLDYIYTQKRNRP

SEQ ID NO: 54083 - protein, 545 aa, Oryza sativa
MAGGGGRERRGGGRLLVGVLLLTLVVSGHCLESTHHRGLKRRRRKHEIHSPIKTVVVVVMENRSFDHILGWLSRTRPDIDGLNGTQSNRLNASDPSSPEIFVTDEAGYVDSDPGHGFEDIREQIFGSADTSAVPAPMSGFAQNARGMGLGMPQNVMSGFKPESVPVYAALADEFAVFDRWFASVPTSTQPNRLYVHSATSHGLTFNARKDLIHGFPQKTIFDSLEENGLSFGIYYQNIPATLFYQSLRRLKHLVKFHQYSLKFKLHAKWGKLPNYAVIEQRYFDCEMFPANDDHPSHDVARGQRFVKEVYETLRASPQWNETALIITYDEHGGFYDHVPTPVVGVPQPDGIVGPDPYYFKFDRLGVRVPSFLISPWIEKRTVIHEPNGPQDSSQYEHSSIPATVKKLFNLHSNFLTKRDAWAGTFENYFKIRKTPRTDCPEKLPEVTKSLQPFGPKEDSSLSEFQVELIQLASQLNGDHVLNTYPDIGRTMTVGEANRYAEDAVARFLEAGRIALRAGANESALVTMRPALTSRASPSSDLSSEL

SEQ ID NO: 54084 - protein, 512 aa, Oryza sativa
MAAAAADPALLDLIPQIHALFADPLRVISYKWLSRNFSVSSNDSKRLLQEFVNKHGADLKVIYSVSGWLKKNPTNYCVKLTSGHKLEEARQEFKDSCSVQVYSIQACIPKDTAVLWNPEFVQAEELFNRPFDEENCLRDNRFCGVLNSFVKRTANGKLVSSFPPKPINSVAAAAPLKTSSAPKEQSAKGQQQGLPGSSSPKKGTSNKAEKDISSVLDKATNAPVVKEPSIALQGNKNKAQNGKALPSNGGSLATMWGRASAKPKTPATTNPTVLPSVAVTADAQICAKEEANADSSDDEQAVHYKRGSSANNRKRRAVFDLSDDDEDDNVVAIASPEPPEQCITNPIDEVAQESNPKQENLENKQEVEKDVKCCIGRTESPECKTKSSNTVSHSGITLKEKNNGPPPNDNKQDHAAETASNSPKRRKVLKTRIDERGREVTEVVWEGEASAGDKAEKNVSDTGAANRATLSSKPQPVAKTEKSNASSKTAGNKKPAKAGTKQGNIMSFFKKV

SEQ ID NO: 54085 - protein, 921 aa, Oryza sativa
MPSASAALVLLFVAFSLSNAQPGFISLDCGGDDDYTDGIGIQWTSDAKFVSAGQKANLLLQNQQLQQYTTVRSFPADNRKYCYTMNVRNRTRYLVRATFLYGNFDNSNVYPKFDLSLGPTPWTTVVIDDATTPVVQEAIILAAAPTLSVCLSNASTGQPFISTLELRQFNGSLYYTTDEKQFFLRLSARINFGAESNASVRYPDDPFDRIWESDLVRRANYLVDVAPGTERISTTKPIFVSTNEEPPQRVMQTAVVGKNGSLTYRIDLEDFPGNAWGVSYFAEIEDLTPNQTRKFKLVIPGKPEFSKPTVDVEENAQGKYRLYEPGYTNIPLPFVFSFGFKKTNDSSEGPILNAMEIYKYIEISVGSQDANIMASLVSRYPEAGWAQEGGDPCLPASWSWVQCSSEAAPRIFSISLSGKNITGSIPVELTKLSGLVELKLDGNSFTGQIPDFTGCHDLQYIHLEDNQLTGALPPSLGELPNLKELYIQNNKLSGEVPQALFKKSIIFNFSGNSDLRMGHSNTGRTIVIIVCAVVGAILILVAAIVCYLFTCKRKKKSSDETVVIAAPAKKLGSFFSEVATESAHRFALSEIEDATDKFDRRIGSGGFGIVYYGKLTDGREIAVKLLTNDSYQGIREFLNEVTLLSRIHHRNLVSFLGYSQQDGKNILVYEFMHNGTLKEHLRGGPDDVKINSWVKRLEIAEDAAKGIEYLHTGCSPTIIHRDLKSSNILLDKNMRAKVADFGLSKPVVDGSHVSSIVRGTVGYLDPEYYISQQLTEKSDMYSFGVILLELISGHEPISNDNFGLHCRNIVEWARSHMESGDIHGIIDQSLDAGYDLQSVWKIAEVATMCVKPKGVLRPSISEVLKEIQDAIAIELQRELPSSIHHLMSKTSPSEAVNTTGSLQDLEQNASFDELLMRPGLR

SEQ ID NO: 54086 - protein, 313 aa, Oryza sativa
MLSSRGRGDAIAISGHQMRAPNPTPPRDSAMARRRKGSSYRRRRRRRRRAHAACGDNRIDDLTDDLLLIILRRLDTRSALATAALSRRWSGLARAGLEALDFMVGDILPPRYHRCIQLHESASGVFDGADELRTIVASIRRHERLAMRNMVASINNFLDADDGFAHGDGGGGAPRRRISRLRVEFIATHYHDCINRLVAKAVDTWGVEDLEVLGRTTYWRHHFQDAHIFRRHGLCNDPHRSRLRSLKLVDCVIPPLQGFQALTKLVLQDLRDSTPAAAYEAVCSAHAYSCKRCTSSPAPASAAVVFSLMPPGQ

SEQ ID NO: 54087 - protein, 630 aa, Oryza sativa
MITGRDIYDVLAAIVPLYVAMFLAYGSVRWWGIFTPDQCSGINRFVAVFAVPLLSFHFISTNDPYSMNYRFLAADSLQKLVILAALAVWHNLLSRYRRNGGAAASLDWTITLFSLSTLPNTLVMGIPLLRAMYGDFSGSLMVQIVVLQSVIWYTLMLFLFEYRGAKALISEQFPPDVGASIASFRVDSDVVSLNGREALQADAEVGRDGRVHVVIRRSASASTTGGGGGAARSGVSRAYGASNAMTPRASNLTGVEIYSLQTSREPTPRASSFNQADFYAMFSGSKMASQMASPMAQHGGAGGRAQGLDEQVTNKFASGKAADPPSYPAPNPGMMPAPRKKELGGSNSNSNKELHMFVWSSSASPVSEANLRNAVNHAASTDFASAPPPAAVPVGGATPKGVSGSVTPAAKNGGGELEIEDGLKSPAAGLAAKFPVSGSPYVAPRKKGGGADVPGLAEAAHPMPPTSVMTRLILIMVWRKLIRNPNTYSSLIGLVWSLVSFRWNIQMPSIIKGSISILSDAGLGMAMFSLGLFMALQPKIISCGKTVATFAMAVRFLTGPAVIAATSIAIGLRGVLLHVAIVQAALPQGIVPFVFAKEYNCHPQILSTAVIFGMLIALPITILYYVLLGI

SEQ ID NO: 54088 - protein, 351 aa, Oryza sativa
MECAAKGLVAEPCAGEARRRCGGCGAVAYCSRAHQTVHWGFHKEECARLAEQMSRIDMLKQFPFTFSVESPAPNHTFPSLRCFLLESFKLHQKGLWKSECICDPEVTSVKDLSKTTDWSMGSALCPCTEPEHNVSTPLTSWKDYYRWRSLPLQSPVAVLLHWPLTLYHCVQLSHLQTSKYDGQDTLCIHYLGPEKELHQLAVFGELRALFPGVHIYIELVGPAVPKSRDGELVTISNYAHCCDESCFCKSSIGSKDLSCSAVTFKLRKGLYHERYSDIVKDSKPHLIVAPNAGIAAYPSWIPTIEIIRKVGIPAIFTDFCEEAAHLASSCITSITGQPLRVPIQNCKFVSP

SEQ ID NO: 54089 - protein, 605 aa, Oryza sativa
MAVMTDVSTTGTALRTPAAGAVKEGDVEKLRFIDEMTTNVDAVQERVLGEILGRNAGTEYLTKCGLDGATDRAAFRAKVPVVSYDDLQPYIQRIANGDRSPILSTHPVSEFLTSSGTSAGERKLMPTIMDELDRRQLLYSLLMPVMNLYVPGLDKGKGLYFLFVKSETKTPGGLTARPVLTSYYKSDHFKNRPYDPYHNYTSPTAAILCADAFQSMYAQMVCGLCQRNDVLRLGAVFASGLLRAIRFLQLNWEQLADDIESGELTPRVTDPSVREAVAAILLPDPELAKLISAECSKGDWAGIITRVWPNTKYLDVIVTGAMAQYIPTLEFYSGGLPMACTMYASSECYFGLNLRPMCDPSEVSYTIMPNMGYFEFLPVDETGAASGDATQLVDLARVEVGREYELVITTYAGLNRYRVGDVLRVTGFHNAAPQFRFVRRKNVLLSIESDKTDEAELQRAVERASALLRPHGASVVEYTSQACTKRIPGHYVIYWELLTKGAGATVVDADTLGRCCLEMEEALNTVYRQSRVADGSIGPLEIRVVRPGTFEELMDYAISRGASINQYKVPRCVTFPPIVELLDSRVVSSHFSPALPHWTPARRSE

SEQ ID NO: 54090 - protein, 75 aa, Oryza sativa
MLRPRRRRRLSAAATASRQMQQGYLSQPRVECGDFEFCLPWHWSRICFNSSGIMLDNHWRKAGCTNQGIVSQGNT

SEQ ID NO: 54091 - protein, 235 aa, Oryza sativa; identical to SEQ ID NO: 28904

SEQ ID NO: 54092 - protein, 85 aa, Oryza sativa; identical to SEQ ID NO: 29368

SEQ ID NO: 54093 - protein, 79 aa, Oryza sativa
MPCLHKWFQNLAWNSMTKIKHMSSTTGTLDMWDSVFVKVHRTNQLKTSQGQEPLYAREKVFVRTRKELRKLKDHGQKQE

SEQ ID NO: 54094 - protein, 132 aa, Oryza sativa
MEESDAAAASAKAPNGEASGGGGRPVEVEDTLPGVLRSFVDGVCSQGGGGGGGEPLLRRIRAASCETAPRLREASRNSARDLLEWTRRGSGLRAILVISVSEPHLTGRAPPPLPFPLSAWTPSGSFFCISFD

SEQ ID NO: 54095 - protein, 696 aa, Oryza sativa
MRHHHLAVAAARSHASLLKSGVAAPTPWNQLLTAYSRSSPDGLAAARRVFDEVPRRDEVSWNALLAAQAASGAHPEAWRLLRAMHAQGLASNTFALGSALRSAAVARRPAIGAQLQSLALKSGLANNVFAASALLDVYAKCGRVRDARQVFDGMPERNTVSWNALIAGYTESGDMASALELFLEMEREGLAPDEATFASLLTAVEGPSCFLMHQLHGKIVKYGSALGLTVLNAAITAYSQCGSLKDSRRIFDGIGDIRDLISWNAMLGAYTHNGMDDEAMKFFVRMMQESGVHPDMYSFTSIISSCSEHGHDDHQGRVIHGLVIKSALEGVTPVCNALIAMYTRYNENCMMEDAYKCFNSLVLKDTVSWNSMLTGYSQHGLSADALKFFRCMCSENVRTDEYAFSAALRSSSELAVLQLGKQIHGLVIHSGFASNDFVSSSLIFMYSKSGIIDDARKSFEEADKSSSVPWNAMIFGYAQHGQAENVDILFNEMLQRKAPLDHITFVGLITSCSHAGLVDEGSEILNTMETKYGVPLRMEHYACGVDLYGRAGQLDKAKKLIDSMPFEPDAMVWMTLLGACRIHGNVELASDVASHLFVAEPRQHSTYVLLSSMYSGLGMWSDRATVQRVMKKRGLSKVPGWSWIEVKNEVHSFNAEDKSHPKMDEIYEMLRVLLQVEQMLSNCEDEDILMITSSGI

SEQ ID NO: 54096 - protein, 348 aa, Oryza sativa
MTLKRVYANQSTVELVIGVLSREGALARMAALVERIHGKKCAPGVVAHVALTLKIFEEGRTEQGILLLRRMLQRNMVFDNIAYSLIVHAHCQAGDLKSACEQRDDMVRRGCRLNSFVYTCLIRVHCRAGDVDEAMQLFEEMISIVLKPYDATYSHLTAGCFRQGRMKEGSEYMDKMLHQGSVPDIGTCNDMLEALCDSGHVSKANELLTALMDKGFVPDQNTYLRMTNGYGKVGDAQGIIKIYHEMEHRGLNIGVDVFSSLIRALCKCGDLKEAEKFLAILERKLLAPTSEIYDLLISGNCEKGNTKKALWFYDRMMTGNDKLVPSADTFMMLVRRVIKPKSTCSPNC

SEQ ID NO: 54097 - protein, 322 aa, Oryza sativa
MPAPSASIHLGVPTPYITSHGSKIARLHMYDWIVLILLVVVDGILNIIEPFHRFVGSDMMTDLRYPMKDNTVPFWAVPIIGIIGPMIIITGIYFKKRNVYDFHHAILGLLFSVLITAVITDAIKDGVGRPRPDFFWRCFPDGVPAYDNFTTGVLCHGKASVIKEGHKSFPSGHTSWSFAGLGFLSWYLAGKIKVFDRRGHVAKLCIIILPLLLAALVAVSRVDDYWHHWQDVFTGGILGLVVSSFCYLQFFPMPSDENGLWPHAYARHILNPDQLENNAQPTSVDRPNSLPNGSFRSPNGLEMGNTGQGQALDFMEAGRRYQ

SEQ ID NO: 54098 - protein, 83 aa, Oryza sativa
MLAIVVQKVWPSKSDNTKLELLLMASIADEGAVIGLSRLAIQTYVRSGMLLYHMPRNKLWLEVAGEKKPSAKTPFWETSTSPG

SEQ ID NO: 54099 - protein, 125 aa, Oryza sativa
MQAVAAAAGMMRRGSLTIDPAGEEEAPAERVGRLVRESPVVVFARRGCYMAHVMRRLLAAVGAHATVIELEGGAAEEEEAALGGGAALPALFVGGDPVGGLEGLMGLHLSGRLVPRLREVGALCT

SEQ ID NO: 54100 - protein, 46 aa, Oryza sativa
MITILFALSSCSSGITFYFNHEPGENYLKAHRKCAFCFLASCPTET

SEQ ID NO: 54101 - protein, 800 aa, Oryza sativa
MDAMEAEEGPFLANDAKLHAGMYRAFHPAVSKLVAIFPFIEASRPRSKSGIQALCSLHVALDKAKGLLQHCADCSRLYLAITAETVLLKFEKARTQLQESLRRVEGIVTEEIGCKIVEIIAELEEVVFTLDQSEKEAGDEVINLLQRNRKMNSSSDSGELEVFHMAALKLGITSSRAALTERRALKKLIEKARSDEDKRKEYVVSYLYNLMRKYSKFFRSEAGDDTDSQGSSPCSPTILGMEDMYGPYGNGRAFSRQLSSIQSFNSRFGSFNSRLGSFNCRRSGPRSENMSIPPEELRCPISLQLMYDPVIISSGQTYERVCIEKWFNDGHSTCPKTQQQLSHLSLTPNYCVKALIASWCEQNDFPVPDGPPGSFDVNWRLALSDSEATGCVSLESFDSINVKSVKVVPLDNVRKEEPANNESGTLDDSSCYDFDMNEGYRNLLLMLHEKTNLHIQCRLVEQIRYLLKDDEEARIQMGSNGFAEALVQFLRNAVQDGNEKAQEIGAMALFNLAVNNNRNKGLLLSAGVIDQLEQMISNPRLSAPATALYLNLSCLPEAKNIIGSSQAVSFLVDRLFSHEARDTKGSSCKHDALYTLYNLSNHQASVPSLLSAGIVEALHSLLSESLASEGLGWTEKALAVLISLAATQAGRKDIMSTPGLISTLAMLLDTGEPTEQEQSVSCLLVMCSADDKCIAPVLQEGVVPSLVSISATGTGKGKEKSQKLLKLFREQRQRDGAQPVPQQAQQQQQQQQQQQQAGETGNGTMVCRRDSKQLCKSKSRKLGRTLSSLWKNRSFSLYQC

SEQ ID NO: 54102 - protein, 447 aa, Oryza sativa; identical to SEQ ID NO: 37103

SEQ ID NO: 54103 - protein, 878 aa, Oryza sativa
MFSRSYTNLVDLANGNLSALDYGGGGGGGGGGNGAGGRPPRARRMQRTMTTPGTLAELDEERAGSVTSDVPSSLASDRLIVVANTLPVRCERRPDGRGWSFCWDEDSLLLHLRDGLPDDMEVLYVGSLRADVPSAEQDDVAQALLDRFRCVPAFLPKDVLDRFYHGFCKQTLWPLFHYMLPFTSDHGGRFDRSQWEAYVLANKLFSQRVIEVLNPEDDYIWIHDYHLLALPSFLRRRFNRLRIGFFLHSPFPSSELYRSLPVRDEILKSLLNCDLIGFHTFDYARHFLSCCSRMLGIEYQSKRGYIGLDYFGRTVGIKIMPVGINMTQLQTQIRLPDLEWRVAELRKQFDGKTVMLGVDDMDIFKGINLKVLAFEQMLRTHPKWQRKAVLVQIANPRGGGGKDLEEIQAEIDESCRRINAQFSRPGYVPVVIINRALSSVGRMAYYTVAECVVVTAVRDGMNLTPYEYIVCRQGFPDLDGSGDDGPRRKSMLVVSEFIGCSPSLSGAIRVNPWNIDTTAEAMNESIALSENEKQLRHEKHYRYVSSHDVAYWSKSYIHDLERSCRDHFRRRCWGIGLGFGFRVVALDRNFKKLTVDSIVTDYKNSKSRVILLDYDGTLVPQTTINRTPNESVVKIMNALCDDKKNVVFIVSGRGRDSLEKWFSPCQDLGIAAEHGYFMRWTRDEQWQLNNQCSEFGWMQMAKPVMNLYTEATDGSYIETKESALVWHHQDADPGFGSSQAKEMLDHLESVLANEPVCVKSGQQIVEVKPQGVSKGFVAEKILSTLTENKRQADFVLCIGDDRSDEDMFEGIADIMRRSIVDPQTSLYACTVGQKPSKAKYYLDDTNDVLNMLEALADASEETDSQEDAEEITSIPDPE

SEQ ID NO: 54104 - protein, 509 aa, Oryza sativa
MIKQILGRLPRKPGRAGDSRDAAGPNGNEPSNSYSVARSVEQGNKRSGNGDYVVPAGLTPNPMMNGTVVYHSNEPLPAFKDVPASEKQNLFVKKVNLCCAVYDFADPTKNLKEKETKRQTLMELVDYVTSANGKFSEVVMSEITKMVSINLFRSSSPTPRENKAIEGVDLEEEEPLMDPAWSHLQIVYEVFLRFVASQETDAKLAKRYIDHSFILRLLDLFDSEDPRERDYLKTILHRIYGKFMVHRPFIRKAINNIFYRFIFETEKHNGVAELLEILGSIINGFALPLKEEHKLFLVRALIPLHKPKCVSMYHQQLSYCITQFVEKDCKLADTVIRGLLKYWPVTNSSKEVMFLGELEEVLEATQPAEFQRCMVPLFRQIACSMNSSHFQVAERALFLWNNDHIENLIKQNYKVILPIIFPALERNARGHWNQAVRSLTLNVRKIFSDHDSAFFGECTQKFNDDELKQEESNSKREALWKRLEEAAVPRSDNNNPVGTPNGKFSQAAG

SEQ ID NO: 54105 - protein, 244 aa, Oryza sativa
MELPPTNDEEVKGNGDHEEVTCDRSGVPVLRLFGKRVMVNDLHQMSAPDAGNLQTVADMEVDASAETPTSGTGKFSSHGAAEANTWNPWLTNTQQFLYYLPNGQIFSVHSALPCFTYHNEGVTCTQFSNPQVVASDQQHQHQTSEAVDYKGIQREGSWTESNTSSSSVPETATHNSETTESYRNGNRNEDEMVPSPDSRKCVSPGSNCRRGFVPYKRCVADSEALLKSQAPQEEADGEMTRLCL

SEQ ID NO: 54106 - protein, 198 aa, Oryza sativa
MSEPASPPPAMPEDAAPPQPQPEPAVPAGEEAAPSLERKEELLPVEEKVSELDESQSQLMGRLRGLKEDLLNWRSSLDTQVTKYKSELSDIKTALNSEIEQLRSDFQELRTTLKKQQEDVSNSLKNLGLQDATDNDGNKGSGEENASEGVSDTLGNLKLDDTPKNHDESSDANDEKNETIAEDGTVDKTVKAESASDE

SEQ ID NO: 54107 - protein, 398 aa, Oryza sativa
MAAAADRLLHLLRAAPASPAPAAVPSSRTRATFYHQPRSLRLAAGASGMRRVAVACSSAGAGGSGVEGDEEGMTYKGAGVDIDAGTELVRRIGRLAPAIGGFGGLFPFGDQFLVAGTDGVGTKLKLAFETGIHDTIGIDLVAMSVNDIVTSGAKPLFFLDYYATSKLDVDLAEKVIKGIVDGCRQSDCALLGGETAEMPDFYKEGEYDLSGFAVGAVKKDKVIDGKNIMEGDIIIGLPSSGVHSNGFSLARRVLEKSGLSLNDQLPRNDGMITTVGEALMAPTVIYVKQVLEIINKGGVKGIAHITGGGFTDNIPRVFPSGLGAKIFTAAWEVPPVFRWIQEVGKIEDAEMRRTFNMGIGMVLVVSKEAADGILEGTHGPNHAYRIGEVISGEGVHYV

SEQ ID NO: 54108 - protein, 656 aa, Oryza sativa; identical to SEQ ID NO: 50483

SEQ ID NO: 54109 - protein, 464 aa, Oryza sativa
MSSSVGGGGGQQFRYTQTPSKVLHLRNLPWECAEEELVELCNPFGRIVNTKCGVGANRNQAFVEFTDINQAISMVSYFASSSEPAQIRGKTVYIQYSNRQEIVNNKSPGETAGNVLLVTIEGVQANDVTIDVIHLVFSAFGFVHKIATFEKAAGFQALIQYTDAATASAAREALDGRSIPRYLLPEHVTSCCLRISFSAHKDLNIKFQSHRSRDYTNPYLPVNSSAIDTLQPAVGADGRKVEAEGNVLLASIENMQYAVTVDVLHTVFSAFGTVQKIAIFEKNGGTQALIQYPDVTTASVAKEALEGHCIYDGGYCKLHLSYSRHTDLNVKAHSDKSRDYTIPQGAMQAVPQPPGVPTTSAGWQGNPQAGGAYAPPGAAAPNHGTTGQVPNWNPGSSGYAPAPGAYPGQMYSSPMQYGASGGFSAPAAPPQELHTSQQMPPPQYGNQPGPAGAPGTGQPHPYYR

SEQ ID NO: 54110 - protein, 131 aa, Oryza sativa
MSTIEEADKAIEMLNRYDINGRLLNVNRAAPRGSRVERPPRQFAPAFRAYVGNLPWQVDDSRLLQLFSEHGEVVNASVVYDRESGRSRGFGFVSMASKEELDDAISALDGQELDGRPLRVNVAAERPQRGF

SEQ ID NO: 54111 - protein, 408 aa, Oryza sativa; identical to SEQ ID NO: 38212

SEQ ID NO: 54112 - protein, 330 aa, Oryza sativa
MLPGSATPAAGSGMFVPTQTVGTVLCCICGVAMQPNPANMCARCIRARVDITEGVPRHAAVVYCPDCTSYLQPPRSWLRAGPESPELMQILLRRLNRPLARLRVSLSAAEFVFSEPHSKRLRLKLRLRREVFNAVVLEQTHPVEFTVHDRLCDACARAQSNPDQWVAVVQLRQHVPHRRTFLYLEQLLLKHGQASLALRVAAAPGGLDFFFGSRSHAARLVDFLATVAPVQTQTAKQLVSHDTKSNVYNYKHTFSVEICPICREDLIALSPQVSRDLGGLGPIVLCIKVTNAIALLDPLTLRCTTSRKRSTGSTTSRLLSPASSSSSTSC

SEQ ID NO: 54113 - protein, 676 aa, Oryza sativa
MDVMNEGKETSDNFCVDKLEKEDEVGSCPTRYCNDTSHSLGSASRKEVMPIIAEKQAFCATTVHDERSWAANAWRARLVKAISQKDSVLPKNADNIHSTSAFGSIGNTENMPGKLTSMLGNRNDSSQDQAMQEKHKDGLIVARCESVSAVNPVARCELASGVNPLARHESTSGCNPRKLEKGKEKLIYDMSNCVSNTNEGDDSNESIESCPSTKAPKRKHGQFSAAEMTSGNKRCRREDNESSCSGLFHKNDSSFFNWMSTLTNGVKVFDETTAVPLNQKFSAATGEEFPTNPVPLQNNCGVPLQSVGFNSLFQSLYSQNVMITSRNTCHQSESSYTANRLTLGFKSSKPVSMGRETLNVATETLAAGRIQMDSYGDRGAFQNQMGIFPLRAERNQNGFHGSSSNAASGHKDDFSESLWVSRLLPKTPMKVMDTTRCDEETDFCSANPKGLGDSSSPQDFNVEKELNNSQYFTSKGSDNETTSSKCAAPQDENKPSETMASIFAKRLDALRHANTSAVHVAITCDHGTPKGRNHKTSSFVVSYNSHDEQESGQKTHKSSGGEGRIVLWTGDKGKEQLSPGNDKELGEKVLSKHENQNCEGSSDGKVVPPKCNLETNTYIEEIDRKRLQNKEGAPNSMENQPDNKQMVPYGIVPNDVYDEASVVLEPCRGSVCLAPI

SEQ ID NO: 54114 - protein, 470 aa, Oryza sativa; identical to SEQ ID NO: 31227

SEQ ID NO: 54115 - protein, 125 aa, Oryza sativa; identical to SEQ ID NO: 29788

SEQ ID NO: 54116 - protein, 255 aa, Oryza sativa
MGEAELSLAAVRDALVREEDSIVFALIERARRPRNAPAYAAAAAAGGRSLAEFFVREAEVLHAKAGQYQKPEDVPFFPQDLPSPLFPTKDYPKVLHSFASSVSVNDAIWKMYFNELLPLFTVDGDDGNYAETVALDFACLKALSRRIHIGKYVAEVKFKDASQDYSPLIRAKDTKALMNLLTFKAVEEKVKRRVEKKARIFGQNVTLEDNADKQEGNAGDSECKVNPEVLSKLYDLWVMPLTKDVEVEYLLRRLD

SEQ ID NO: 54117 - protein, 207 aa, Oryza sativa
MAAAAAADSTSAVPPAVVSAAEDTLAAAESVGDHLAEMVAAAGEDPDAIAELPPLRRARAFLAMAKAAASLFAVRLRCSGVDPDEHPIKKEFERLSLWEEKLNRFEDWDKAALRPTTTVNTQAAARFIGHSLPHLTTDQKRSMQAISRGEGGSYSGNKRKPQPPRPNKKSVRAATEEFLAKAALELSGHNDSKVKGPIRLLSDEDED

SEQ ID NO: 54118 - protein, 613 aa, Oryza sativa
MEALSLIDVAAEDDLLLDLTSPPPLHPDPPHAGCDEVMAAEASRLDPAGDSPEMRRVVDPDGATEEAPEQSESPKRRKAKAGVNLRKSLAWDSAFFTSEGVLDTEELAVVNSTFRKAQGSRLPGIAEEMRRSGESTTSTLESESWVMENLETELFDNVRASIQRSHGNPGKAPGVTAVISKPPKSKANVPRVAARKGVDLMPQSKIRAPISTSQGAAGGKQRIQATLKEPTTARVPISGSTEVKPSLKPPRALPRVATMRAPTNTAVASGIPDKRSSTGGVVNRQTVCKSVNNSVSAHSRPGGVTKSTSTSKSGALPSSLSSSAAATAASIGNMLGQKPKSSTLSNKSRIAQRIPVRSTSRTDVNKANPARASRNNIPTGGKSNRVSPSISPSSSVDSLSSVVSGASTASTVGKMSHTSESFSTRSSSLSPSLRNSNDHAPTRADADTQGKGSKPSGLRMPTPKIGYFDASIDQQIGAHMQVQPMKIQCSPQLSSAQMGDPASSILSQPESRLAASPHEKKSSVQSKASPLLPLEVVQIELEPSQAMEHEVCTPQPCPVVAAAAAAAADTAKENIPALHQNIQPNDGAGSLAVDLICQRLSTISLGDATDLAS

SEQ ID NO: 54119 - protein, 305 aa, Oryza sativa
MLLKESPVTLDDAFAIHYAAAYCEPKVLAELLKLESANVNLKNSSGYTPLHMACMRREPDIIVSLIEKGASVLERTQDGRDALTICKRLTREKDRNEKSEKCKERSKAYLCIGVLQQEIKRRPQILEDQMSAEESIATPLLVDNFHMRLLNLENRVAFARIFFPSEAKLVMRIAQADSTQEFAGLTSANFSKLKEVDLNETPTMQNRRLRERLDALTKTVELGRRYFPHCSEVLDKFLNEESTDLILLESGTAEDQQTKRMRFSELREDVRKAFTKDKAAGAAISSSTSASSSPRRERRGRSRRA

SEQ ID NO: 54120 - protein, 338 aa, Oryza sativa
MAPLSWRHHTLLQALLSRGPLSERDFHALFSAISGGKNPATHRQLFDDTLLKINKELTYLQFELRAGINQYDGTVYYGVVNNIADEESKLGSKFSVPQIAFYKGLLEAIVHEAGNDGSITNIDALNTRIENQVVIADASQGSQSRLPTSITNFSLSQKEKTLNELIQDRWLSYTPTGKIGLGIRSFLDLRSWLRSNDIPSCEVCNEACIKASCCPNEECNVRIHGYCLKKKFSQRKASRACGCGTEWPRLEGEDGGAEDEDVNEPEEDQVPSANQHSRTRRRGVKSELVEENERAGPSARMTRRALRSSKAEAVEAAQEVPSAAGPSQSTRASKRRKN

SEQ ID NO: 54121 - protein, 205 aa, Oryza sativa; identical to SEQ ID NO: 28762

SEQ ID NO: 54122 - protein, 144 aa, Oryza sativa
MEKGRRRHIPAFGEWNQQCEELPITQYFDSAMEQGLVVTAGHYYHATAGELLFKVAGSPPPKKPPKKVRSTKNGMENQAARRRDGPSVVVDGGVVVHGSRRPRVVRAVDEDLYKVPSELLRKKAKGRKHVRSLWMGCVGLNCVA

SEQ ID NO: 54123 - protein, 76 aa, Oryza sativa
MSYQGPPPGTAAYPPPGTGYPPPAYGAPPPVAADYGGYQQQQPPPPPQDSQSRGDGFLKGCCAALCCCCCLLDMCF

SEQ ID NO: 54124 - protein, 462 aa, Oryza sativa
MEVGASSIMEDANGVVDLDVDIVGLESGAACSKFVKTEDPDATECSSSFGDTLSGSEDDARPSEISDIEVDSPFCRYPANGDAAALMDAAVSDNLDRLLKKKRVTDHWRKYISPLMWRCQWLELRMKDLQSQVSRYDRQLAVLKHEKELQTKMIELDCSSSRSVPFSSHCCRKTMKRRRRKRNEEKMNASSYISNHTVFSYYEKTEADAFSIDDDEDTDENTTVNNETDWLLGIKRGEATVEQILLSIQSAQDKVLSLRSSLKKAMAKKSKGAILKVNTHMNGAQSSSCSPGKGKVLERSPRDMSDCDMDDAAMPESALSSYGEANDMDIFESTMSLLSAEVPHQMGEFHQSSEDVLIDNQAAEEGYQNFEVISHPCKRLRVSVKRESGAHSEDESVAPTVSVKKEAQEEATTSFGLQAAFFKPGYTGKRRRRMPKIQRRGGSSASPFSSWISSRIRKKRQF

SEQ ID NO: 54125 - protein, 355 aa, Oryza sativa
MTNGAGGGGGGGGLGGTRVPTWRERENNRRRERRRRAIAAKIYAGLRAYGNYNLPKHCDNNEVLKALCNEAGWTVEPDGTTYRKGCKPPQAERPDPIGRSASPSPCSSYQPSPRASYNPSPASSSFPSSGSSSHITIGGNSLIGGVEGSSLIPWLKTLPLSSSYASSSKFPQLHHLYFNGGSISAPVTPPSSSPTRTPRLRTDWENASVQPPWASANYTSLPNSTPPSPGHKIAPDPAWLSGFQISSAGPSSPTYNLVSPNPFGIFKEAIASTSRVCTPGQSGTCSPVMGGMPAHHDVQMVDGAPDDFAFGSSSNGNNESPGLVKAWEGERIHEECASDELELTLGSSKTRADPS

SEQ ID NO: 54126 - protein, 735 aa, Oryza sativa
MGRGGIGGAGLVAAVAKADVENTDSTRGFVKDVKRIIIKVGTAVVTGPNGRLAMGRLGALCEQVKQLNFEGYEVILVTSGAVGVGRQRLKYRKLVNSSFADLQNPQMDMDGKACAAVGQSVLMAIYDTLFSQLDVTSSQLLVTDRDFMDPSFGNQLRETVNSLLDLKVIPVFNENDAISTRRQPYEDSSGIFWDNDSLARLLAQELKADLLIMLSDVEGLYSGPPSDPQSKIIHTYVHEQHGKLISFGEKSRVGRGGMQAKVAAAFTASSKGIPVVIASGFAIDSIIKVMRGEKIGTLFHREANQWGCSKEATAREMAVAARDCSRHLQKLSSEERKKILLDIADALEANEDLITSENQADLDLAQDIGYDKSLVARMTIKPGKIKSLAGSIREIADMEDPISHTLKRTEVAKDLVFEKTYCPLGVLLIIFESRPDALVQIASLAIRSGNGLLLKGGKEAMRSNTILHKVITGAIPDVVGKKLIGLVKNKDEIADLLKLDDVIDLVIPRGSNKLVSQIKAATKIPVLGHADGICHVYIDKSADMDMAKRIVLDAKVDYPAACNAMETLLVHKDLNRTEGLDDLLVELEKEGVVIYGGPVAHDTLKLPKVDSFHHEYNSMACTLEFVDDVQSAIDHINRYGSAHTDCIITTDGKAAETFLQQVDSAAVFHNASTRFCDGARFGLGAEVGISTGRIHARGPVGVDGLLTTRCILRGSGQVVNGDKGVVYTHRELPLQ

SEQ ID NO: 54127 - protein, 424 aa, Oryza sativa
MPPRALPPVEDDAGRDWVGDLPEEVLHHIMSFLDARQAVRTCVLSRRWRNLWRTVPCINADFDEFDLVFYQGDDEDYDDVLAFKRFVNRLLELRDPTAMIDTFWLRYTTRPEGNTNSNEDAYGWISHALQKQARVLEVVVFCCLFELDHSVFTSCYLRRIAFSGIVLCKGFFAQLEAGCPALEDLFLHQCGVHDDEISSHTLKVLTFDSVFFYMPMDTVEFTLLNKTSISLPSVTSLTISTPEGFTPILKDTASVVTASVSVSVTMSSFRFRFDANDLGQYLQSLSGITNLEFNYQGSKLTIENHLQWCPEFLNVVNLTLGQWCLDSNFYALIVFLQNSPRLQKLTLKLEKSNMRISRRIIGELTEISFTCEHLNTVEVICSENDPQVITVQDFFVSSGMTSVQFHIKHWSPYANDLPAFIRSI

SEQ ID NO: 54128 - protein, 461 aa, Oryza sativa
MGSPSYRLAAAITIPSTDEFLLVRQPPPPSPAPAPEEEEYLYRGYVDSELYDLPSAPLRPLAGELRSDVAIRGADSVAGRLDISRLDVSASLDQICDQFGLPSGICGEWRLLKYVEEAEFGPDAGLNTVLIIGSLESKLEALQDSWRWMSKECASGLLSGAKSGGTRIGPYAYIGLLKPELPSNWTVAPALPCQEYPPGIKLVPMKSNTLQPFRTTNLVVVVATDTPGGSTCSDCVVYGDALLIDPGCCSQVHGKLAELVNSLPKKLVVLVTHHHHDHVDGLSVVQRCNPDAVLLTHKNTMSRIGKGNWSIGYTAVAGGENICIGDQQLQVVFAPGHTDGHMGVLHVNTNALIVGDHCVGQGSATLDNRAGGNMKDYFQTTYNFLDMSPHVLIPMHGRINLWPKHMLCGYLRHRRAREVSILQSIENGARTLFDIVSKTYADVDRKLWIPASFNVRLMLII

SEQ ID NO: 54129 - protein, 463 aa, Oryza sativa
MPPKSSPAMSARSKSTPDSDLRSHDGIPNPGSWSGRLTRSRAKQIGLVLPIQAVESPGISSNNNKKRRIEEETAGESRATVIPTTTTTGEPGTLARRPIHPPQPHSTAPRIGRESSWIAQRKVDRLRKATLRDAEDEPSTAAAMPTPSDKKMVLGMSRSIVRVSSPPTEGKFISPLTGTVISWDGATKRAMILTIYSTDFKSKPHEPQPELWVHLPDKSIVQGRLIFVNRHYSLAILEITSDLPLQVPTFGSAAKYGQEILALSRDENMSLVARRGAITWSDGSLMWRNHYMFLDCDVPEGGEGGPVVDYCGSIIAVVYRDGPCAAIISISIIHALYEMWEQFSCVARPVFDMDLKSVKLASFSLREELSLKHNIEGGFIVEHIANDSALENLGVRRGDVIFFEDKCGTMLPEIEDYLLHLGRRYLGEKRSMVLKLEVHDIEGTCKETITLPLEFKVSSGKVA

SEQ ID NO: 54130 - protein, 360 aa, Oryza sativa
MQITLWFLSGQVSEEMARSARARRHVARQLRSAPYPTPSYRWKAMKESNRKKTLPAAQKMDWEDANCSVCMEYPHNAVLLLCSSHDKGCRPYMCGTSHRHSNCLDQFKKAYTKGALLEELPANTVGTNLDSTPLIAGEKNESVDLACPLCRGKVKGWTIVEPARSYLNGKRRTCMQDGCSFVGTYKELRKHVKSEHPLAKPREVDPILEQKWRLLEIERERQDALSTITATMGRAIVFGDYVLDLEDEDDLDDVESDEDDNANGHGTDNTRRMLMFLMRQVARHHQNQRLQNAIGTTGGAEDNYAVSSGANATTPYHYPLEGDDEDDLVMAGGGSTGMVRPERRRRRRRRNRERLFLGAN

SEQ ID NO: 54131 - protein, 409 aa, Oryza sativa
MDGSRQEMPPPTELSALGHREVAAAERPFKKTCHSSVPTSSTLCEPHVWPGLLESLLHQIIALLSSFQDLLAFSATCHSWRAALSSFPSVYTFNFPPLCLKLNTPNIRPLRVLLKDNLLSYCKWQLDDPSKRNISLRCSAPPDAPNRMRYLGCSYGYLIFSYHEKNCLFVDAYTSTKLKSPKLNFMGDRDIYYGILTAPLNSPNSHLILCSRSSIFYWQVGTNSWTKHGYGGEHILQIVLFKGEIFAMDVLGRLHTMQFAPELSIQEVAVLRREEMVTGPRSGPWLVACGEMLLMVDLSTDRDQLPRTFQVFRLEFSAETVECVKMERLENQALFVNLDGRDPTFSCTSPERWGGKSNWIYVAKPSGDSGEPWTAVELGQPVPSRIDRVPDFQVDNMWVVPSLIYDVNQ

SEQ ID NO: 54132 - protein, 381 aa, Oryza sativa
MMLLARAVLRSRLRCPPLSAAAASTAAFSSAPSPAAAEAERAVRDGPRNDWSRPEIQAVYDSPLLDLLFHGAQVHRSVHKFREVQQCTLLSIKTGGCSEDCSYCPQSSRYSTGLKAQKLMNKDAVLEAAKKAKEAGSTRFCMGAAWRETIGRKTNFNQILEYVKDIRGMGMEVCCTLGMLEKQQAEELKKAGLTAYNHNLDTSREYYPNIISTRSYDDRLQTLEHVREAGISICSGGIIGLGEAEEDRVGLLHTLATLPAHPESVPINALVAVKGTPLQDQKPVEIWEMIRMIATARIVMPKAMVRLSAGRVRFSMPEQALCFLAGANSIFAGEKLLTTTNNDFDADQAMFKILGLIPKAPSFGDEAPAADTERCEEAASM

SEQ ID NO: 54133 - protein, 146 aa, Oryza sativa
MQDPRGMPRDEFATPKTHKRKVVSRPLPPSQIKAEPELLRREVPLTSGKTKKAPKITFKNEPRHSAPQSDWGTPDSVPEFGPADEYRALRKKYLLLEDENGELDKQLSQAEEEASVLEDEKFALLDQLVVLEGLVDPSQMQPPRRL

SEQ ID NO: 54134 - protein, 254 aa, Oryza sativa
MSSSRGPPSPPSHPNPIDPFAAAAAAAAEAEGEAAPPPRNPIIPRDPPSPEMEATAEALTREEVLRRRRRRAKRLVDVYRRLYWTLGEELRARHRQYVWELGRSPLEAEQPPPPPPTSAAPGPGGDLVVVRPVSATVPRRKKCGFAGCKVRTMAMARFCHSHILSDPNQVLYKGCAYISKSGPQVQITCGRPILKASVPSLCNSHFQKCQKLITQGYKKFGVNPSPTGKVSPNFGLLVAECVRQIQAKRRESPS

SEQ ID NO: 54135 - protein, 157 aa, Oryza sativa
MAAAAAGAAAAPSRLMLRFRDGELRFAATDDALRVPLGYAIGAPFIRNERIFRLLDEYARTHARGGGADAVANIAAWDRDFMAREVTDTVTLYDLFVGATALGIDGLSDLCAQMTADAVKGRPVGEVKALLGITDVGMTQEEELKLQQDNDAILYLR

SEQ ID NO: 54136 - protein, 385 aa, Oryza sativa
MALQFVESQREARPELADPYADLADLYQRKLWHQLTLKLDHFLQLPAAQTGDTLIQLYNNFITDFETKINLLKLAHFAVIASRQYPDKDAAISFLEGVITKLRETKDLRINEPILYVKMQIAAINLEKGNQKECKKLLDEGKSTLDSMTDVDPTVHASLYWISSQCHKARQEFAEFYKNALLYLAYTTVESLSESFKLDLAFDLSLAALLGDNIYNFGELLARPIINSLIGTKVEWVYHMLQAFNTGNLALYQELCRVHNAALSAQPALVQNERKLLEKINILCLMEIIFSRASEDRTIPLSVIAERTKLSISDVEYLLMKSLSVHLIEGIIDEVDSTVHVSWVQPRVLGIQQVKALRERLDAWVGKVHTTLLSVEAETPDLVAA

SEQ ID NO: 54137 - protein, 587 aa, Oryza sativa
MGEEAATAAAAERDEQGSVTAALDAITGLVSASLAASLFPYKWQLIRDRLNRLHAGLADIATGGGEGGEGHGALAGVLGAVVETAREASELVPRSQGRHYGGGKLRLRSDLDVVAGTLDALVARVDEVYASGALTRARALVVSRPCAGASRDDVRFYVRDLFARLRVGGAEMRGEAAAALAEVLHDDEKCVRVVVSDVADGVCVLVWLLECPDACVQEEVLEAVSVIAGFEAYRGDLVVGGVIAPVIRVLDSAGDRPSAKERAARLLCKLTENSDNAWAVAAHGGVTALLNVCADYTASGGELVCAACRVLRSLAGVDEIRKYMVAEAGAAPVLVSLCRGAADEAAQIQAMELLAAIASGDSSVREAVLQEGAVESLVSVLDPASPRSSKAREVALRAIDALCLSSPPLTSRLVAAGFLDRVLVFLRSGDATLQHCALKAAHRLCHASEDTKKAMGDAGFMPELVSILHAAKSLEARDMAAEALCAMVSVHRNRKRFVQEDRNVAQVLQLLGPDDEKLSPAKRFLLSTLMHLSDSTSGRRKIMSSEHLRNLERLAETNVTDAKKIVKKLGGSKLRNIFHGIWSLQKA

SEQ ID NO: 54138 - protein, 172 aa, Oryza sativa; identical to SEQ ID NO: 40585

SEQ ID NO: 54139 - protein, 361 aa, Oryza sativa
MLAPRSLRKAAVPPSLLSDPSPGSLQPTRLAVHVNAAGSSCSAYLASGCRVYKIEIAMEGEMLSKGKESLLIPINAEVISSSVVDRCPHRSEIQSVVLAEGEGDGCLILGTVDSYGHLIVSRLDTVADDIDRASYSVPPRDCGVGEGSWAGLCFSPMHQSTVAVARELCKCIDIYDQDIHVRSLRTLWYPSSFSFAQCMPQVNESGSMLAIAEGSQLSIWDLRTSNNGGCIHRISGPIGGIIYSLCSSPSGPIAVGGTDRTVTIYDPRRWSALSRWVGCSKYEITGLSFSSVDESFIYVQGVDYEITCGLWKGNERAFSFRGDSNWLGFSKCANTDVVAGWCESGSVFVADVRQDCLSVIG

SEQ ID NO: 54140 - protein, 655 aa, Oryza sativa
MPPPPRKRLGRAALLLAAAAYLAFLLLFELPSLDLFPSSDAAAGAAMPTHRPRRRELEASSSSSAFASPVLRRPATAVSPAPASAAAAAAGALPIFSSLLLLPRPNATATPFDGTAAEAFAAARPHLDHLRTAAAAAAEEASSSSTAPTCPTSISVHADGLPGDGVRTVELPCGLAVGSHVTVVARPRAARPEYDPKIAERKSGQEPLMVSQFMVELVGTKAVDGEAPPRILHFNPRIRGDYSGKPVIEMNSCYRMQWGQSQRCEGYASRPADETVDGQLKCEKWIRDDDKKSEESKMKWWVKRLIGRPKDVHISWPYPFAEGKLFVLTLTAGLEGYHVNVDGRHVTSFPYRTGYTLEDATGLSLNGDIDIESIFASSLPNSHPSFAPERYLEMSEQWRAPPLPTEPVELFIGILSAASHFAERMAVRKSWMMYTRKSTNIVARFFVALNGKKEVNAELKREAEFFQDIVIVPFMDSYDLVVLKTIAIAEYGVRVIPAKYIMKCDDDTFVRIDSVLDQVKKVRSDKSVYVGSMNYFHRPLRSGKWAVTYEEWPEEAYPNYANGPGYVISADIARYIVSEFDNQTLRLFKMEDVNMGMWVEKFNNTLRPVEFRHDVRFYQSGCFDGYFTAHYQSPQHMICLWRKLQSGSSRCCNVR

SEQ ID NO: 54141 - protein, 1130 aa, Oryza sativa
MVSKSYSNLLEMSCGDGVDFRQPFKSLPRVVTSPGIISDPDWDTRSDGDSVGSASSVERKIIVANFLPLNCTKDEAGQWSFSRDDDALLMQLKDGFSNETDVIYVGSLKVQVDPSEQDQVAQKLLRDYRCIPTFLPPDLQQQFYHGFCKQQLWPLFHYMLPICLDKGELFDRSLFQAYVRANKLFADKVMEAINTDDDHVWVHDYHLMLLPTFLRKRLHRIKLGFFLHSPFPSSEIYRSLPVRDEILKSLLNADLIGFQTFDYARHFLSCCSRLLGLHYESKRGYIGIDYFGRTVSLKILSVGVHVGRLESILKLPATVKKVQEIEQRYKGKMLMLGVDDMDIFKGISLKLLGLELLLDRNPKLRGKVVLVQIVNPARSTGKDVEEAITESVSVAERINLKYGSVDYKPVVLIDHRIPFYEKIAFYAASDCCIVNALRDGMNLVPYEYTVCRQGNEEIDNARGSDTNCHHTSTLIVSEFVGCSPSLSGAFRVNPWSVDDVADALHHATDLTESEKRLRHEKHYRYVRSHSVAYWAHSFAQDLERACKDHYSRRCWAIGFGLNFRVIALSPGFRKLSLEHFASSYNKATRRAIFLDYDGTLVPQSSINKAPSDELITILNSLCDDPKNDVFIVSGRARSLLDEWFAPCQKLGIAAEHGYFVRWNKAAEWESSYPNHDFEWKHIAEPVMQVYTETTDGSSIEPKESALVWHYLDADHDFGSCQAKELLGHLERVLSNEPVVVKCGHYIVEVKPQGVSKGLVVDKVIHRLMNNGKTPDFVVCIGNDRSDEDMFKSIDSMTSSSAFPAVPEVFACSVGQKPSKAKYYVDDAGEVVRLLKNVAGISSHREAAVQAALQQEIALAAGLLRIFFHDCFPQGCDASLLLTGANSEQQLPPNLTLQPRALQLIEDIRAQVHAACGPTVSCADITALATRDAIVASGGLPYDVPLGRLDSFAPAPSDAVFQLPQPTSDVSTLLSAFQTRNLDNVDLVALSGGHSIGRARCSSFSNRFREDDDFARRLAANCSNDGSRLQELDVTTPDVFDNKYYSNLVAGQGVFTSDQGLTGDWRTSWVVNGFAGNHWWFYGQFGSSMVKLGQLQGPSGNVGEIRRNSCFVPNSQTILAAAGDDGFTASA

SEQ ID NO: 54142 - protein, 147 aa, Oryza sativa
MTSMDKAANVVLDIEGLPQQPDKCCTGSPKMTRALSRKGSNRMERRSGEEQEQDDLVKKLIIKVVPSQLEQLKMPLVQNKALVTPQSQCAACAPILTDSGEGRNKKFNRLTSVHPRKILLFFATLSSVGTMILIYFTLAINGGKAEA

SEQ ID NO: 54143 - protein, 426 aa, Oryza sativa
MGEEAVVMEAPRPKSPPRYPDLCGRRRMQLEVQILSREITFLKDELHFLEGAQPVSRSGCIKEINEFVGTKHDPLIPTKRRRHRSCRLFRWIGSKLCICISCLCYCCKCSPKCKRPRCLNCSCSSCCDEPCCKPNCSACCAGSCCSPDCCSCCKPNCSCCKTPSCCKPNCSCSCPSCSSCCDTSCCKPSCTCFNIFSCFKSLYSCFKIPSCFKSQCNCSSPNCCTCTLPSCSCKGCACPSCGCNGCGCPSCGCNGCGCPSCGCNGCGLPSCGCNGCGSCSCAQCKPDCGSCSTNCCSCKPSCNGCCGEQCCRCADCFSCSCPRCSSCFNIFKCSCAGCCSSLCKCPCTTQCFSCQSSCCKRQPSCCKCQSSCCEGQPSCCEGHCCSLPKPSCPECSCGCVWSCKNCTEGCRCPRCRNPCCLSGCLC

SEQ ID NO: 54144 - protein, 274 aa, Oryza sativa; identical to SEQ ID NO: 36122

SEQ ID NO: 54145 - protein, 177 aa, Oryza sativa
MLQAQHFHWPYWSPSSFCNYTSDSRLWYEYCFMRYDNYNFLGEVDTREDASVTMRQWPDMDNPKAFQKAAGKAMGKATAQAVAVGSSGLGRAKEQYTPFVSVYALAQCTRDLSPPSCAQCLSAAVSKFDKACGSGPGCQIDYSSCWARYEIYPFYFPLAAAGRATIDMTKYTKVTVH

SEQ ID NO: 54146 - protein, 540 aa, Oryza sativa; identical to SEQ ID NO: 35278

SEQ ID NO: 54147 - protein, 579 aa, Oryza sativa
MPPPRTKHRPLLLATTFLSLLLLLLLLSLLSTAHKAFAVADDDGHRARVLLAADGGERNADAEHAAAVDRHCAGTLHRDVCVSTLSTIPNLARKPLRDVISEVVGRAASAVRASSSNCTSYLQRPRQLRTRDRLALSDCLELFGHTLDLLGTAAAELSAGNSTAEESAAGVQTVLSAAMTNQYTCLDGFAGPSASEDGRVRPFIQGRIYHVAHLVSNSLAMVRRLPTQRRRGAEEEPLEGYGRVRRGFPSWVSASDRRRLQQQVAADVVVAKDGSGKFTTVSEAVAAAPNNSETRYVIYIKAGGYFENVEVGSEKTNIMFVGDGTWKTVIKASRNVVDNSTTFRSATLAVVGTGFLARDITVENAAGPSKHQAVALRVNADLSAFYRCSFAGYQDTLYAHSLRQFYRDCDIYGTVDFIFGDAAVVLQNCNLYARRPDPNQKNVFTAQGREDPNQNTGIAIQGCKVAAAADLVPVQANFSSYLGRPWKTYSRTVFLQSKIDSLIHPRGWLEWNGSFALDTLYYAEYMNRGDGADTSARVSWPGYHVLTNATDAANFTVLNFVQGDLWLNSSSFPYILGLS

SEQ ID NO: 54148 - protein, 253 aa, Oryza sativa
MASSPSAVVLQAALDGDLHLLCEMAKKLDLRGFKDMNGRNALHLAASYGHLEICKFLVEESGLDVNSGSHRGETPILLAACDGDINVLIYLLDHGGDPAIPNAGGFMPLHYAAEYGHVDVVRLLLSKGVHVDPLNYSGAPLHLATANDHDQVAKVLLEHGADPNRVVNHVLSPLVVACCSHSLKCMKLLIKAGADVNDRSSTGPRTTPLVLAVDDGSADIVKILLEAGADPNIRNEWEDSYHDGSSSWSTRAC

SEQ ID NO: 54149 - protein, 508 aa, Oryza sativa
MEGGGRGGGPVVAALLLAALLLAAVAPASASSYPAKVVSGFLSNAASSVMKRLWSLKSTTKTGSGGKSMVKYEGGYTVETVFDGSKLGIEPYAVEVTQGGELLVMDSMNSNIYRIALPLSRYSRPKLVAGSPEGFPGHVDGRPREARMNHPKGFTVDGRGNIYVADAMNMAIRKISDTGVTTIAGGKSSRGGHVDGPSDDAKFSTDFEVRYIGSSCSLLVIDRGNQAIREIQLNFDDCVYQYEAGFPLGVAVLLAAAFFGYMLALLQRRVLGMVSTEDEPETQTPLKASIASIPPYQKPLKQSVRPPLIPNEDESEKQEVEEGFFTSIGKLIVGAKSSVAEIVGAAFSRKKRLNIHQQQARVRSWPVQESYAIPRDETPPPLDTRTPTPRKNYAFMSKEPEKIHHIRHGRSQFNGWNGDAPQQQQQQQQQQQIHHQQYLQHHRQYSSGPQTFYEPSCEATNEIVFGAVQEVDSKRRAVEIKPMNHGDPQYDQDGLRHRSSYTGYSNNW

SEQ ID NO: 54150 - protein, 660 aa, Oryza sativa
MTARSGDPGVSPESSSAAAAAAGSGGGEIWGTSEDLLLACAVSRHGTASWDAVAKEMQSRCPSAAVFTPTTCRLRFRVLHRRFSGGVTAENEDADGGEEEEEADAAAVAGWVEELRELRVAELRREVEKYDLSIGSLQSKVKRLKEEREKSISGETKPPPAAAAVKEEEEDVRKGSPEEAGAVEDRVSGHESGRSCKESNSSDLKRPENDPAVADDDDREAEEEEEAAAAPAAGDIAVKEEASGESVAGSKEADVEKESSDVQSSASPSRRRRRKGGGGGEVAEAASPSVSVPLPAAEAEPLVAFLESVRTSKAGAVFERRLDSQDGERYSGTIRRHVDLETVRSRLVGATAAAAAAACYASASEFYRDMMLLCANALVFFPRGSPEHAAALQLRALVSKQVSKDRQPHAWAKAPAAAAEEEEKKKPAKADADIAGPLLEKAPIIVCRKRSSIAKAAAAAAKGEKAEKAETDKKEKDGSEEKKKAAAAATTATAAATAKDKKARGMRTNKSRGPARNQKTAKLSETGEGTKKSDKKGGGGGGSSSAGAAAGGVAKKRNAVDFLNRMNQNGSPSTERVSLLETLKLSAAATEQQKKSSSSSSGKGDGRKEAGGSGSKKGAAASTPPGRRIGRPPKRAAAPPTPPPSKRAKDDKPTRKRGKK

SEQ ID NO: 54151 - protein, 42 aa, Oryza sativa
MENVVCFGKDKCYYLMKHFSTLNSLHRRALGNTKSTSIPVSI

SEQ ID NO: 54152 - protein, 617 aa, Oryza sativa
MASSPHQVVAPQPQSQAQAGGGGGGGGGGTAEQFWSLLDKADRRFARVRDLPLFGRREPDEYGKVFRIYTQLWRMQQEHRHHLLDAGLRRWQVGEIAARIAHLYYSQYQRTSDTALLSEAFVFYHAVLDRGYFLADAADHLFAPTKHLRFLARFLLVALLLARRADTVPRLTTHIRTLLDDSKKTLQEADYKEWKHVVQEIARFLRADSPFINMRPLRYSYAFDPPPDTLPTVPPTVKKRGLVLNDAMLCSYYQNEIKFTDLTIDVFRMLQCLEWEPCGSFALTNGYSTRDESGQNHPNLLKDLRDAALPPNPLKTILYRPSVTHFLTVLATKCEELPSNGMMLIYLSAAGEVGSSGFCPDTNEMVVSSLNKFDISNTSTINVNEDNGPRLWLGCREGEGSNCIYPCDLIPFTRRPLFLVIDSNASYSFKSIHGFEKGETTAMLLSPSCRSSSAGFSGDSVRQIGSQFTMFLTAPLQAFCHLIGNNGVDIDRDTYNKAEELLSLSLNEWATTLVASSSLHPVWVEVLGDPLLRRLLLRFIFCRAAHSIFKPTYHKVDFLPTCTPPLPESVDAESMLSQCCLLRVASFFGATNQFSFSEVTTWPEVDVEETAVVNPSI

SEQ ID NO: 54153 - protein, 673 aa, Oryza sativa
MSWVKRADCCKWEGITCSSDGTVTDVLLAAKGLQGHISPLLGNLTGLLHLNLSHNLLNGNLPMELLFSRSIIVLDVSFNRLDGSLPELQSSSGGFPLQVLNISSNLFTGQFSSKLWEAMKNIVALNASNNSFTGQIPSSICINSPSLAILDLSYNQFSGSIPPELGNCSKLREFKAGYNNFNGALPEELFSATSLEHLSLPSNDLQGVLDGSDILKLVKLTVLDLGSTGLSGNIPDSIGQLSTLEELRLDNNNMSGELPSAVGNCTNLRYLSLRNNKFVGDLSKVNFTRLNLRIADFSINNFTGTVPESIYSCSNLIALRLAFNKFHGQLSPRMGNLKSMSFFSIADNHLTNITNALQILKSCKNLTAVLIGTNFKGETISKSETIDGFENLRVLTIDSCGLVGQIPTWISKLKKLEVLDLSNNMLSGKIPFWISDLPVLFYLDITNNSLTGDIPTALMNTPMLQLGKNAAQLDPNFLELPVYWTRSRQYRLLNAFPNALNLGNNGFTGVIPPEIGRLKMLDGFNISFNRLSGEIPQQICNLTNLQLLDLSSNQLTGELPSALTDMHFLSKFNVSNNELEGPVPTGGQFDTFLNSSYSGNSKLCGAVLSNLCSPTTRKENFTSQRRNLRCALVTGITLGALVALALLACFLIGRLVYDDHTESLTHLQMRYRR

SEQ ID NO: 54154 - protein, 718 aa, Oryza sativa
MDITEVTVVHHAALVLLALWAAVSAGWAHPAIFLAALLYLFAVNERYTMRLRKRIQHEERKCANQRRLLSDAETVRWLNYAVEKIWPVCMERVASEQFLLPIFPWFLEKFKPWTARKAVIQDLYLGRNPPMFTDIRVVRQSTDDDHLVLEIGMNFLSADDMNATMAVQLRKRLGFGITANMHITGMHVEGKVLVGVRFLRQWPYIGRVRVCFVEPPYFQMTVKPLFGHGLDVTELPGISGWLDRMLDVAFGQTLVEPNMLVIDLEKFASESTDSWFSVDEKPPIAHAKVEILEGADMKPSDPNGLADPYVKGHLGPYRFQTKIHKKTLNPKWMEEFKIPVTSWAALNLLSLQVRDKDPIFDDTLGDCSISINKLRGRQRHDIWIALKNIKTGRIHIAVTVLEDENEKVPNDDDEQCGTPKGGKASTPRSSFSSRTNNESESSEEFRKISAEYEPVDIEGLEKVDVWVHRPGSDVAVTWEPRKGRARCQDSRILRENDVYCDSPKSCQSESQRSDSSTEEPANGKSRHHLHKVKKGLGKLAGAMFKSPKKESDDEASPCVTPHPNIKPLGEKRVSVRYVVDEDPSENLPDDQHSSPERGESESPTKRHLRKKAVHMVKHAGNKTAHNLKNMFSRKGSDKSKEGQDDQKDDPDTIVVEPSKVKKDNPDASEVDIDPSQVENDIPDSTAIDPLKVDSNVANNIVVDALEYASESDAKDKPQ

SEQ ID NO: 54155 - protein, 495 aa, Oryza sativa
MQVALASYLVPSEARGLDIWRKLQRLKNACYDAGFPRADGHPCPTLFANWFPVYFSTVPDDSLSDELEVAFWRGGQVSEEGLEWLLLKGFKTIVDLREEDVKDDLYLSAIHEAVSLGKIEVVNLPVEIGTAPSAEQVQRFAEIVSDSAKKPIYLHSQEGISRTSAMVSRWKQYVTRAERLATQNRSLNGNGKHVRNDQTEQLTNSPGFSSEGSENGTPLESDRTMEGETCDIDIETARHNLEITNSLPSEQSTEQGELHGTRTELQSNFRLESNPLKAQFPSCDVFSKKGMTDFFRSKKVYPKSVLNPRRRSNSLLVSRRKQSLSAEQNGAIDYEAAEFKVLKSSNGASFDNDYILSVASGITNGKPSNNGASTSVEDREMETSVVTVDPRTSDTSNSNGNAPLGSQKSAERNGSLYVEREKSDHVDGNMCASATGVVRLQSRRKAEMFLVRTDGFSCTREKVTESSLAFTHPSTQQQMLMEISSKDCPTIEEIR

SEQ ID NO: 54156 - protein, 265 aa, Oryza sativa
MTRRSSSSSSSWRRRSATAAEAAGDRGSAAAAHGLRRQREGGRGVVGGDGAAAGVRAAVAVGAAPRRRGPADEERRPGAARGEAAAAADADADGDAEAAGGGAEGAEAGQGAPVPAAVAAAEAGGVEAHRVRAVQEQVRRRRRRRRRGRRVQLLRRRLQELRRREGGRGRRRGRRRQLGQEGQEEEALVVAPRSRPPVAGAGLLLARRCTPWLSPSRRLVVAAARRTCVQFGARIHGVSLVSSSSSFQFFFHFFLSFCFFSSSFV

SEQ ID NO: 54157 - protein, 385 aa, Oryza sativa
MTLSASGILVSDAAGKNRPALDIDLNVADEQFLEEDVSQSSVQTTGSESGNTRRSNGPVRSVGFELDLNRADEVAENGQIVSNTNHRVEVPLLSRPLPGVFSSSDANSSRDFDLNNGPTLDEAGTEHAPRSLSSKNTSSIPFLPQVASMRMNSAEMSNISPWFASANACAPVAIKSFLPSRGEQPHPVETAAGSGTQRIITSMADGVQHGSDPSRTPVISTSPTMMFHPPAYQYAGFPFTPSVHLQAPGFSIGSTSYANSAPGGIPYFPTIAPTLVGPAGALPAQHTRQYAINLPEGSSTVGHDNNRKWGRQGLDLNSGPGSVDVEVKDDRVTLPVRQNFIAPPHAFVDEHTRMYQMPPGVGIKRKEPEGSWDAERSSYKQLSWQ

SEQ ID NO: 54158 - protein, 624 aa, Oryza sativa
MERRRKAMWLYPKVVGFNPPERWGHSACFFEGVVYVFGGCCGGLHFNDVLTLNLETMAWSSLATTGARPGTRDSHGAALVGHRMMVFGGTNGSKKVNDLHVLDLRTKEWTKPPCKGTPPSPRESHTVTACGGCDRLVVFGGSGEGEGNYLNDVHVLDVATMTWSSPEVKGDVVPAPRDSHGAVAVGSRLVVYGGDCGDRYHGEVDVLDMDAMAWSRFAVKGASPGVRAGHAAVGVGSKVYVIGGVGDKQYYSDAWILDVANRSWTQLEICGQQPQGRFSHSAVVLNTDIAIYGGCGEDERPLNELLILQLGSEHPNGRYNISMCKVLSNHWSQERRKFLRTENQRDPNMSNGELGPRSREAEIEQRNPFLRGLENGHVKRRRTGDVRLKETESEQEEHSLSLSQHSSPSQSDQEQNGAQKLSASPNGSISALQPFVHLNTNGTLRAAGGVSPRTLKTDQFLRTIAPQQRHEVQFLAAEPKLHHRPPTPPLIGAEVHGTIDGAFDSGYLMTAVVNGQLFRGVLFAPGPGVTAPRPTLHHPILMSSAIPPQQQQQRPVLAHAIPVHARPVPQATGFVLPDCSNHARQAFPASAAAAAAKIIKSEPERGGSDLHDVVLTLGGPGAGK

SEQ ID NO: 54159 - protein, 233 aa, Oryza sativa; identical to SEQ ID NO: 31925

SEQ ID NO: 54160 - protein, 187 aa, Oryza sativa
MALRLSVSSSHGPASSPAISTCRPAACGRFPALLGGGVASQRRSLTVVSGPETRAVIPVRSSGSDTATVGAEAEAVAVTGQVTEVNKDTFWPIVKSAGPKVVVLDMYTQWCGPCKVMAPKFQEMSEKDQDVVFLKLDCNQDNKSLAKELGIKVVPTFKILKDGKVVKEVTGAKLDELIQAIETVKSS

SEQ ID NO: 54161 - protein, 247 aa, Oryza sativa
MTTRKCVIALTGHTNSVTCVKWGGDGLIYTGSEDCSIKVWETSQGKLVKTLQGHGHWVNSLALSTEYVLRTGAYDHTGKTYSTAEEMKEAALARYKKMRGNAPERLVSGSDDFTMFLWEPTISKQPKARMTGHQKLVNHVYFSPDGQWLASASFDKSVKLWNGITGKFVAAFRGHVADVYQISWSADSRLLLSGSKDSTLKVWDIRTRKLKQDLPGHADEVYAVDWSPDGEKVASGGKDRVLKLWMN

SEQ ID NO: 54162 - protein, 282 aa, Oryza sativa
MRTNRRQMGTTVRTNARWLFGGDGRSSSNARMERSESANEDILIFYFQLDLQTRIQYALNIEQFDVAKQLREKLTEIETVIIRQREAKRGSSKTEAQDKAINLLRVRADLQKAVDSENYALAAALRDEIAKLETESLAVSAKALAYQNVKYAFRLGQKVRHKVHGYRAVICGMDHVCCESKSWMETANVENLSKGPNQPFYQVLVDVYADQELLVAYVAEENLAEAEIPEKGRFDHPYIEFLFFGEDTAGDFIPIKQLREKYDQPRYEASGDEDDDDGSTDS

SEQ ID NO: 54163 - protein, 474 aa, Oryza sativa
MQLRVLPNARAALIRAVADAPGRREEQALHCLACKLGLAGDAVLATALLTRYARRGLLDPARRLFDEMPRRDAVAFNAMLAALVASRRMADARELFERMPDRTPASWNTMVTCYCKAGDLGSAREVFEASLGATASNVVSWNTMIDGYCKAGRMDAAQELFDCMGCSFSSSPSPDVVTWNTMMAGYLRRGDPATAIAMFRRLMRQTVQQQTLMMPTTVTIATVVTACTQAGDFAFGRRVHHYIRQLGTRIDAVLSNALIDMYFKCGSVDRALDVFATMPDGPNLFCWNTVIAGLGMNGRGEDAVRAFHDMVGRSRTCRGIIRPDGVTFVALLSACSHSGLVAEGRRFFAEMVPVHGVEPREEHYGCMVDLLCRAGLLGDAVRVVRAMPVRPNAKILGCLLLHARRLSSASEEDGVRVGEWVADRISELDLDDGAAYGLSNMYASLQRWDHVEMHRIKVNAAVRHKQPGQSSCMI

SEQ ID NO: 54164 - protein, 728 aa, Oryza sativa
MFYSHTILARKSPLGTVWIAAHLERKIKKPQIDGIDIPSYAEFIMFPEVPIALRLSGHLLLGLVRIYSWKVNYLFHDCNRMLSTIRTAFASVQVDLPLHADHAPFDTITLPDTFRLDDINLDDAIRLIDTPDNHRKSLDQITLAEGDYLMIDLDEDARVELSAPGQSSHMGPEPTDEERLPPFHIDFGPSDNMDEEISVDPSQGNNSEAVNTSNINQADKAPDLPEIMREAPFEGPELNLPDIDEVNNDPMDVTEESSPFVSKNITPPALERTISPGQGGLSGTSIPNARGSTSTTYDNIEDVIPMDIGMPDFRIEPSPPRVQDEMNAQPVQGEINAQPVQDEMNAQPVQDEMNAHPAQDKRRIRYDNEIVFSNAYMKRQIDGGELHRLVSKRRKLPQAAVDVWKFNRIRQKDGFLLDPLVHGMCATLRQTYERTFPHVIDPEAESGSVEHTPGVANDSIQDTHDHQLSPKSPGNTDAQPEHQFNQQAPRNSDGQPEPELNPKSPVNAEAQPESQINPQSPRNADGQPEPELNPKSPGEAGTSHFDDMPEIPRFSPQNIPSPIRDDNSPFKTPGAGGTPKSRLGETPASGTPADMSYMSPGQDSDPQVSPFPFNDELDGDLPEIPSLMSTPGVISTAGTGTTGLGSMSARTRAVAQYFKDQMASATSDDQPGKFILNRILEGRHRKQAARMFFETLVLKSYDYIDVEQEAAYGDIAVSVKPSLSGAKF

SEQ ID NO: 54165 - protein, 404 aa, Oryza sativa
MDGRAGCCVRFIGCCLAADGDAALSQSAAALHRMASAFLDAHGEPLVLLDHRVLCSHGVATVGHSQAFAAAMRQRREEIPPAPFRILLQEEYVGWAEVAACANGNKIVDKKSWRASVRNMLDAVYRMICQVLASAVRSVWAIGTYMLPLSAAEFFRRRLPASAVPEKISWRGVISTFRFQIFPDTCAIVACSVCIEAQHRLEFERLHGQGTFILELPDSTRKLRRFCLERKAWFKGKGAHIDSLLSLIQETGGVPAISTTNTRSSLLLPLHSYDYFSLRGCWTNLTPQQAAQLIFTGGPCIGSLWVDGSYTSKHHYSDDNDDDEEDMLVYRGCDPKKKIHRDKETGLHAVVCYAYLFIGKELHIRVQDNMPICSPHNWILFQAFDMFYTLRVMPLDASRLYDPL

SEQ ID NO: 54166 - protein, 940 aa, Oryza sativa
MVKAYLRYEPAISFGVVASPESNVAYDPSGRLLLAAALDRFAAWDLKRGLPSLSFATAAPSPSLAVSCLATFPSAASASASSIASGHADGSIRLWDTETGSCEATLHGHRSAASALVFGPSGAIIASGSKDCDIILWDVVGQAGLYRLRGHRDQVTGLVFLDSGKKLVSCSKDKLIRVWDLDTQHCLQIVGGHRSEIWSIDVDPSERFLVSGSADQELRVFTVRKSAEEGEDWSKWDMLKLFGEIPRQSKERVATVKFNKNGNLVACQVAGKTVDIYRVLDETEAARKAKRRMHRKKEKALAKSMAAEGNGTVIDPLSAQDLQNPTPVVTDIFKLLHVLRVNKKICSVAFSPNNPPKGCLATLSLSLNNNMLETYSVDNENVSNMYSIEMHGHRSDIRSLALNSEDNLLMSTSHNAVKIWNPSTGDCLRTIDSDYGLCSAFVPGNRYALVGTKSGTLEIIDINSGSSIEVIEAHAGSIRSIVLIPNEDGTAGAWGFVTGSADHDVKFWEYQLMQKSDNDSKQLSVTNVKTLKMNDDVLAVTISPTGNHIAVALLDGAVKVFTMDSLKFALTLYGHKLPVLCMDISSDGVLIVTGSADKNLKIWGMDFGDCHKSIFAHTDSVMDVKFVSKTHYMFSVGKDRTVKYWDADKFELLLTLEGHHAEVWCLAISSRGDFIVTGSHDRSIRRWDRTEEQLFIEEEQEKRLEETFEADLDSAMDHKYGQKDGAPDEGSVGVPGRKTKETVTAADAIIDALDTAEEEVKRLDQHQEGQNNGNGTTFQPNVIMQGQSPSDYVLNVVSNVRPNDLEQALLSLPFSDALKIMSYLKEWSMVPLKVELVCRVCLVLLQTHHSQLTTTPSARSILTELKGILYSRVKECKDAIGFNLAAMDHIKELLAMRSDAPFRDARAKLMEIRQEQSRRSDRSDGAEKRKKKKRRTSGES

SEQ ID NO: 54167 - protein, 642 aa, Oryza sativa
MPVARPEPQEPRVIAHVDMDCFYVQVEQRRNPELRGQPTAVVQYNNWKGGGLIAVSYEARKFGVKRSMRGDEAKMVCPSINLVQVPVARDKADLNVYRSAGSEVVTILSTKGKCERASIDEVYLDLTDAAKEMLLESPPELLELIFEEATKSNILGLPSDVSNREDSVRAWLCRADADYQDKLLSCGAIIVAQLRVKVLEETQFTCSAGIAHNKMLAKLVSGMHKPAQQTVVPSSAVQDFLVSLPIKKMKQLGGKLGSSLQDDLGVNTVGDLLSFTEDKLQEYYGVNTGTWLWKIARGISGEEVEDRLLPKSHGCGKTFPGPKALKNNASVKTWLDRLCEELSERIQSDLNQNKRIAQTLTLYARACKKNKSDSIKKFPSKSCPLRYGTVKIQEDAMKLFESGLHDFLGSQNTKWSITSLSVSASKIFDIPIGTSSILRYIKGPNSTVSPANLDCSSLPEDPSLGNKLYIAPNHEEHCEPSLSEKEDYGNNSNLAKQCQIKEEKKVSKKLTEVKGTCSILKFLSQSPVLSEKRKIDSLICSHPGPESSSEPNKAEEHKAAQYVDRNKFNTAGSNSASSSTWMFNVEDIDPAVVEELPPEIQREIHGWIRPPKQSSSKTRGSTISSYFQPAKSYSLQAIPILL

SEQ ID NO: 54168 - protein, 605 aa, Oryza sativa; identical to SEQ ID NO: 53578

SEQ ID NO: 54169 - protein, 448 aa, Oryza sativa
MLFLPRQLALSAAAAAAAMAKEESRKEKKAKTKAASSAAAVPDARRAAVVAAVAAFLESSGFPRALAALQSEANLEAGSWRSSPVSLEELVSGFLEDSSNYAPGASINGSIEHEKTAAVVAEDAGKKKKKKGSDTKVSEAENKVAEPSAVEKPSENADVETKEKKQKKKSKKQENDEDVEARLEKAESAIINKFETVDTLKEDSKNGLVDVAPVEKGKKKKKGKSTPETSDKVDTGSTDAGADCAKGKGDAAEMEKDNNEKKSKKKLKKSKENVEVVENKEVAGKDSAPKSNDENNSGMETEKGENGMPPSDNAVVGKKRKLEEVEGSNLPAKEDNTASQKLSNGSSEDDGAKPNKRQKKSSEPKTVNAFQRVKLEDVKFADDRLQDNSYWAKGGADSGYGAKAQEVLGQVRGRGFRHEKTKKKRGTYRGGQIDLQTHSIKFNDSDDE

SEQ ID NO: 54170 - protein, 924 aa, Oryza sativa
MARNAADKGTSIDAQLRILAPKKLSEDDKLVEYDALLLDRFLDILQDLHGEDIRETVQECYELAAEYESKIAYRRRIKLKKGDFADENSATTESNFEETLKRLVGELKKSPHEVFDALKNQTIDLVLTAHPTQSVRRSLLQKHGRIRSCLTKLYAKDITPDEKQELDEALKREIQAAFRTDEIRRAPPTPQDEMRAGMSYFHETIWKGVPKFLRRVDTALKNIGINERVPYNAPLIQFSSWMGGDRDGNPRVTPEVTRDVCLLARMMAANLYYAQIEDLMFELSMWRCSDELRVKADQLHRCAKKNTTKHYIEFWKQVPPSEPYRVILSNVRDKLYNTRERARHLLASGFSEIPDEATFTDVEQFLEPLELCYRSLCACGDNSIADGSLLDFLRQVSTFGLSLVRLDIRQESDRHTDVMDAITQYLGIGSYREWSEEKRQEWLLSELNGKRPLFGPDLPQTDEIADALDTFHVIAELPYDSFGAYVISMATAPSDVLAVELLQRECHVKKPLRVVPLFEKLADLEAAPAALARLFSVDWYRNRIDGKQEVMIGYSDSGKDAGRFSAAWELYKAQEELIKVAKQFGVKLTMFHGRGGTVGRGGGPTHLAILSQPPDTIHGSLRVTVQGEVIEQSFGEEHLCFRTLQRFTSATLEHGMYPPISPKPEWRALMDEMAAVATKEYRSIVFQEARFVEYFRLATPELEYGRMNIGSRPSKRKPSGGIESLRAIPWIFAWTQTRFHLPVWLGFGAAFKHVLQKDIRNLQILQEMYNEWPFFRVTIDLVEMVFAKGDPGIAALYDKLLVSEDLWPFGARLRANYEETKQLLLQVAGHKDLLEGDPYLRQRLRIRDSYITALNVCQACTLKRIRDPGFHVSPRAHLSKDIMDSGKPAAELVKLNTTSEYGPGLEDTLILTMKGIAAGMQNTG

SEQ ID NO: 54171 - protein, 294 aa, Oryza sativa
MVEFLQSSVGIIHKNHAESITLFIKESVDEELKGTDSPNVSKNKRLTFCVEGNISVGKTTFLQRIANETIELRDLVEIVPEPIAKWQDVGPDHFNILDAFYAEPQRYAYTFQNYVFVTRVMQEKESSSGIKPLRLMERSVFSDRMVFVRAVHEANWMNEMEISIYDSWFDPVVSSLPGLIPDGFIYLRASPDTCHKRMMVRKRSEEGGVTLDYLRGLHEKHESWLLPSKGQGPGVLSVSQVPVHMEGSLPPDIRERVFYLEGDHMHSSIQKVPALVLDCEHDIDFNKDIEAKRQ

SEQ ID NO: 54172 - protein, 267 aa, Oryza sativa
MTALIAKLTTLLMDQYKLQNSARGDIIFIKAELESIQAALEKLFEVQVTDRQVKIWERDVREQSYDMEDIIDNFMVHVETHLLAKPHELKGFMKGSLSLLRRAMVRYRVATDIKRIRRLVNETSARRDRYKVGTIVAAAKTETAIDPRLIGIYGEATKLIGISGPKEELTKLLMDSKGNSKNKLKVISIVGVGGLGKTTLANVIYQQLRGQFECHAFVSVSLKPDLKKVLSSILRQFSEQGYAWTETWCAQEIINKIRDEIKEKRYN

SEQ ID NO: 54173 - protein, 480 aa, Oryza sativa
MARAPPPLSSLPPPPRRPTVVLLLGLALAFCLAVLSIQSSFFTAPRLASRLDLDSDEVRALSGFQSRVQQCVARRGLGLTADIIDHCKLVLRFPKGTNSTWYNTQFKYFEPLEYNYDVCETILLWEQYRNMTTVLTREYLDVRPDGWLDYAAKRIAQLGADKCYNRTLCEELLSVLLPAKPPFHPRQFATCAVVGNSGDLLKTEFGQEIDAHDAVFRDNEAPVNKKYAKYVGLKRDFRLVVRGAARNMAPILKGSSDEVLIIKSLTHKEINAVIKELPNPVYLFQGIVLRRGAKGTGMKSIELALSMCDIIDMYGFTVDPNYTEWTRYFSPPRKGHNPLQGRAYYQLLECLGVIRIHSPMRAKRVEDWSDIPSREEIRTAHAAAFRLKRHETGQSDQMGPFSNCKVWGTVDPDYGPVSGTPDMSETRKSSNYKKWEVLPFDSLRMEAQEHHVQMGGVSLYKMDGNKLDDLVCVRHERSSS

SEQ ID NO: 54174 - protein, 223 aa, Oryza sativa
MLVTPGGGGSLHRSSRNPNHQRVRRLLARRRLLVAGGAAVLRPEVREHRLARGHLLQARHVQRDVPGPGAVDPVVAPLAAAVAAPARRRRRFAEVEYAAVVGWPAPVQPGAARVQVAAAAGAVVDEPRRRRDLAERVAEPPCSPRRTVVERERAAPVPVERVGDRLLGVGADVVEVEAAGVAGVQLAEPGLLAGVALPWLLRSMCLSNLSYEATRHLHVQIYY

SEQ ID NO: 54175 - protein, 124 aa, Oryza sativa
MKLASVNPTLDFNIERILSKDIFQCRGTTASSAFGFFPDIVHPRLHPPKYTQVGMPSIVNPTDAFGRVIHAPLGTNSAFKEPKHQVCTITCIWLNGHFHFMLFIPNTVFMKNRTSFCKMFQDLI

SEQ ID NO: 54176 - protein, 359 aa, Oryza sativa
MHPNGAPLAVPPGFRFHPTDEELLYYYLRKKVAYEAIDLDVIREIDLNKLEPWDLKDRCRIGTGAQEEWYFFSHKDKKYPTGTRTNRATVAGFWKATGRDKAIFLGSGGGTRIGLRKTLVFYTGRAPHGKKTDWIMHEYRLDDDNVDVPEEGWVVCRVFKKKSIHQRGFDQPDMAAAADEDELRYQLLHGAGMSSSPVDQKHVLLQEQLVAHGAHGGGFVVPAFEASMHLPQLASADAAPFGGGGGGHVAFASMNPLDAAGCGSQNMMTMKMAATSGGEMLLMSGGGVDGGRFGAAADWSILDKLLASHQNLDQLFHGKVAGAHQQQQQMAMDAASSLQRLPFHHYLGLEAADLLKFSM

SEQ ID NO: 54177 - protein, 580 aa, Oryza sativa
MMIRNGGGSRHVMLSERLTHIILGAPSEEEKKEVRRLAAWGVINVVKATWLEDCNKAKKEVKVSPSYVANELLAKEFSCAVMEKTVMRETKAAKNSGGIFHIPTVNDLHDKQLGNDLSSERKSARGKHETMNSNRTATKSAISSQQNGVASTSEYHPKFQVNSSAINRQSSRSSNTFKGRIFCFSNSFSHDRRAQVVDWVREGGGIMVDDAQSTVVDFIIESHGQNSMLRDSSHSTAVSTHWIRSCLEEGCFQDVGSHPIFSPLCCRIPFPGFEDFRFCVSQYEEKDRLLLKNLCFILGSKFTEKATKKVTHLICKFASGPKYEAYYSRGIPTITAEWLFECVRQDRIVPFDQFQPKPPTSQDRDAGLCTVSQYPTQAAKTISRFDCSESHTESQLPRSSSKYNSGNASVNEEPNDPGVSKRRRLSEFGKANDTSGNIGRTEELQDSTPVPDVADAIEDLLVQSSKIQDVQPPRSIFAPDDSVLNQDQENTHSFGISRHWLNMPQKLHSTPDTKVQSGNSATTSAAPPAAATAYYPFSETQTESQVVGYEEDLTGRQKIIDRVRSQSINVTPAAEMSSDT

SEQ ID NO: 54178 - protein, 348 aa, Oryza sativa
MDAQRALLDELMGTARDLTEEERKAHKEVRWDDPDVCAAFMARFCPHDLFVNTKSNLGSCMKIHDLKLKESFESSPRRETHMRRFEAELAQQCEKLVIDLDRKIRRGRERLAQDVAVPPPVIGKTSEQLSIIEEKVKRLLEQIEELGEAGKVDEAEALMRKVELLNAEKTALTNQADNKVAMLPQEKKMELCEICGSFLVADDVLERTQSHVTGKQHIGYGLVRDFLAEHKAAKEKARDEERIAREKKAEERRKQREKEYDVGGRDGGSRREKSGDRDYDRDRYYDRNRGRERSHDHRDRGSEYRSSSYRNGRDSERDRHRYRSDDMRKDRSRVRSRSRSPSRHGPDQ

SEQ ID NO: 54179 - protein, 53 aa, Oryza sativa
MYTTVFGRTLLKQQWASVSKGPQRFKMLCENLYFQIISESSGWGHCRGFITWT

SEQ ID NO: 54180 - protein, 849 aa, Oryza sativa
MSPPAAGGLAGARGEGGGAGVGRVFVGAGCNRVVNNVSWGACGLVAFGAQNAVALFSPLRGEIVTTLPGHKATVNCTLWLPTKKDVLQIRSRERHYLLSGSSDGIIMAWKIDSGKGEWTRALQLPVMHKKGVTCLAGRMVSDTVSIFASTSSDGTVVIWKMEDEPTSVGSCEVSCLHSISVGPKPMVSLSLAVLPGQGGHLILAMGGLDHKVHIYCGDQSGKFIKACQLKGHSDWIRSLDFSLPVMMGSEEHSLFLVSSSQDRTIRIWKMNSDAVSSAHTTHRKEDIGIASYIEGPLFVSSNTHYQVSLESLLVGHEDWVYSVEWQPPTLLTDDEAHQPMSILSASMDKMMMIWKPEKNTGLWINSVTVGELSHSALGFYGGHWQPDGKSILAHGYGGSFHMWRDVGLGSENWQPQIVPSGHFAPVSDLTWSRSGEYLLSVSHDQTTRIFAPWRSQVSPGDVTCWREIARPQIHGHDINCVAFIQGTGNHRFVSGADEKVSRVFEAPLSFLKTLQHATLLKTDNSGDFDDVQVLGANMSALGLSQKPIYTHGPRETQSSISNDGPDSMETIPDAVPTVFTEPPVEDQLAWNTLWPETHKLYGHGNELFSICCDHEGKIIASSCKAQSAPVAEIWLWEVGTWKAVGRLQSHNLTVTQMEFSRDNAFLLSVSRDRHLSVFSIRKTDDGAEHHLVAKLEAHKRIIWACSWNPFSYEFATGSRDKTVKIWSVQDSSSVKLLVTLPQFHDSVTALAWTGRDRASNAGILAIGMDNGMIELWNISGGRASTDSSGSGSSPLSFACMLRFDPLLCHVSTVHRLRWQKSDSSDEKSALQLASCGADHCVRVFEVRDI

SEQ ID NO: 54181 - protein, 178 aa, Oryza sativa; identical to SEQ ID NO: 29572

SEQ ID NO: 54182 - protein, 430 aa, Oryza sativa
MAPAHSHRRGATEANEQMRRKKEKALREKEAGDDDFDEGRYKRAVEHYARAAALDPGDISFPIKCAKSYFHMDQYEECVRRCDEAVERGRELRAKKSLVALALLLKGTALLNLADCASDCKAAIRALKQSLDEHYHKGTEAILDEAESAMEEMEELEKEAAKHHREKGKELLSKKKYKEAAIQFTKAIKRNPLNPRNFSDRAKCRIELNALAEGLEDADKCIEVDPTFWKGYFCKGEVQFLMHNYEDAMTTYLDGLKYGPQKTTIYDGIKRCLEQIKMAKDRDVRDKDLWEAFKKSSSSQVEKLTMQRDVVTVELKSAKERNANLELQLSEQIGRIERLLSIQNSEPPHFICPISQEVMNDPHFAADGHTYEAEHIRKWLNDGHDTSPMTNERLQHKKLTPNHALRSAIREWHQHRNMRHTSPRRQQLFL

SEQ ID NO: 54183 - protein, 279 aa, Oryza sativa; identical to SEQ ID NO: 51720

SEQ ID NO: 54184 - protein, 256 aa, Oryza sativa
MIGDGQTRFTARGGQPVYHFLGTSTFSEYTVVHVGCVAKIHPAAPLDKVCVLSCGISTGFGATVNVAKPPKGCTVAIFGLGAVGLAAMEGARISGASRIIGVDLNPAKFELAKKFGCTDFVNPKDYDKPVQQVIIEMTNGGVDRSVECTGNAAAMISAFECVHDGWGVAVLVGVAGKDAAFKTHPTNFLNERTLRGTFFGNYKPRTDLTGVVEMYMNKELELEKFITHSVPFSEINTAFDLMLSGESLRCIIRMED

SEQ ID NO: 54185 - protein, 127 aa, Oryza sativa
MAAAGDESAAAAAAAAAAAGGAAAGEAAVDSKDLQQQSKALDKLTDRVEDRQLDSSRVQSAMAALASSKEADWNAMRLREKELAAIKINPADVEIIANELELDKKIAERTLREHKGDAVAAVRFLLR

SEQ ID NO: 54186 - protein, 668 aa, Oryza sativa
MAVSSPTSAPEKKRKWLLSNRKVIDKYLREARAILATAPEAGGGDAVAALGLVDAALELSPRMESALELRGRALLSLRRYRDVAEMLRDYIPSCAKTCSGDDTLSSSTSSSLSSSGSGDLGTISRAKLLSPDRHRSDAAAEPGAAVARSFRCFDISELKRRVLASLSKNPNTDTQWRYLVLGQACFHLGLIEDAMVLLQTGRRLASAAFRRESVCLSEDSFSSSSPAAAVAPIPSGNTTKSGSAFIIPAMESEAVSQLLAHVKLLLRRRTAAMAALDAGLPAEAVRHFSKILEARRGVLPHPFAAACLVGRAAAFQAGGRPADAIADCNRALALDPAYIPALRARADLLQSVGALADCLRDLDHLKLLYDAALRDGKLPGPRWRPQGGVRYREIAGAHRKLTARIQGLRSRVAAGEACNIDYYALLGVRRGCTRSELERAHLLLTLKLKPDRAVVFGERLELVDEHRDLEAVRDQARMSALLLYRMLQKGYSFIMSAVIDEEAAERQRAREAAAAAAAAAAAAAAAAAAALAVKQEATKQELAAPPMPEKPRQTESAPCAKRSMASKAKPKAKPAATVPSMMSRKAATTTTTAKAAMSKAAVTAPKAAAATAVAATAVAAAATAASTSTAAPVYQGVFCRDMAVVGTLLSRGGFVDRAMPVKCEAMSC

SEQ ID NO: 54187 - protein, 520 aa, Oryza sativa
MAVRRRRPGPVAAAVLLLLAVATQAAASPIKTVVVVVMENRSFDHMLGWMKRLNPEIDGVTGGEWNPTNASDPSSGRVYFGEGAEYVDPDPGHSFQEIRQQIFGSDDASGPARMDGFVQQARSLGDNMTAAVMNGFSPDSVAVYRELVGEFAVFDRWFASVPSSTQPNRLFVHSATSGGATSNNPELLAKGYPQRTIFDNVHDAGLSFGVYYQDVPAVLFYRNLRKLKYLTKFHPFHGAFRDHAARGSLPNYAVVEQHYMDSKSHPANDDHPSHDVFQGQMLVKEVYETLRASPQWNQTLMVVTYDEHGGFYDHVPTPVTGVPSPDGIVGPPPYNFAFDRLGVRVPAIVISPWINKGTVVHGPNGSPTATSEYEHSSIPATVKKLFDLPQDFLTKRDAWAGTFESVVQGRTEPRTDCPEQLPMPMRIRLTEANEEAKLSEFQQELVQLASVLNGDHQLSSLQDTIRDRMNVREGIAYMRGAVKRFFETGMSAKRMGVDDEQIVKMRPSLTTRTSPAIEQP

SEQ ID NO: 54188 - protein, 635 aa, Oryza sativa
MAASAAPVAPASPSPSPAAAADGEEGEGPAPAAEDDSLKNDVYTAAAYGDLEKLQRLVEGEGHPVTEPDGLGYHALQWAALNNRVAAAQYILEHGADVNAVDHTGQTALHWSAVRGHIQVAELLLKEGAKVDVADLYGYQATHVAAQYGQTAFIYHIVAKWNADPDVPDNDGRSPLHWAAYKGFADSIRLLLYLDAYRGRQDKEGCTPLHWAAIRGNLEACTVLVQAGKKDDLMVKDKTGLTPAQLAADKSHRQVAFFLDNAKRVYDRGCDGNTNFGKLSKLGLAPVLWCIIVGLLATYIHSVISGQYIMDMTAPFGLFAWSGVFLATAGLVMFYKCSRKDPGYIKANIRDSQNQRDDEPLLKLELDNPALLSGNWSQLCITCKIVRPVRSKHCSTCDRCVEQFDHHCPWVSNCIGKKNKWEFFMFITLEVFAMIITGSAAIIRMVRDPASPASFIPWLSYSAFNHTGALSFFIMDLFLFFGVAVLAVVQASQIAKNITTNEMANSMRYSYLRGPGGRFRNPFDHGARKNCSEFLLNGYNEDIERLDHTSHTDEEMGMIQMTNAVSQNGEGPSHHGNGTGHSCAESHAHSKSHSQVSSSQCCDHSKKADRTPLGLGLGLGRNSASRQYVRSLLPL

SEQ ID NO: 54189 - protein, 303 aa, Oryza sativa
MAIFVALRSPEVELLGLTTIFGNVYTTLATRNALHLLEAVGRTDIPVAEGSHVTIKKATKLRIASFVHGSDGLGNQNFPPPTGKPLDQSAAAFLVEQANLYPGQVTVVALGPLTNLALAIELDPSFPKKIGQIVILGGAYSVNGNVNPAAEANIFGDPDAADIVFTSGADILAVGINITHQVVLSDADREKLEQSDSKYARYLSKILGLYYDYHKDAYFIKGVYLHDPATLIAAVDPSLMTYTEGVVRVQTDGITKGLTVFDTTKKRYGEITAWTGKPTVKVAVTVDAPAVVEMIMQRLTTDD

SEQ ID NO: 54190 - protein, 120 aa, Oryza sativa
MLRITRATHPKPLWLMSEPWSRVSLGCRFPPSISIWVKRLCRVSLAVDPVALDCQKLISQGLMEITQNCGRRTLKNTLICTKFPMIVGQILLLCTLWVMLHCGCKLMRLCIVLRLGLNFV

SEQ ID NO: 54191 - protein, 313 aa, Oryza sativa; identical to SEQ ID NO: 46581

SEQ ID NO: 54192 - protein, 727 aa, Oryza sativa
MSRRRAAAVAAAAREEEEASPAQRLVEAALRGDVVTMEACLAAAAAAAAADDDTDDGVPAASRVGVARLRVRCAEVALREEAAGEVIVESRELKTDVSPLFAAAHAGHAEVVRTLLVAGADVNQKLFLGYATTAAAREGNIHILEMLLQAGVTREACEDSLSEAALFAEAEAVRLLVCSEMIQPEAAAHALVTASSRGFDDVVVILLQNGVDVNSMARVLLRSVKPALHANVNCTPLVAAVMSRQISTVKLLIEEGSYLDCLVQVGSWCWDSATGEELRVGACLGEKYNAIWCAVEYYECSGEILKLLLDKAPWLLETPRKGRNLLCHAILCQNPNAVSVLLNAGANPRFPIMMTNGTHVSYPIHFAARLGHAPVLKQLMLDGANINAQTSTGDTPLMVSARCGHSDCFLELIKSGADLGIVNNAGDTAIMLAKKSSFSSTIIDILSRALSCGGCITSSDITVFSPLHFFAASDSAEALLMTLHYSAADLNRPDGSGLTPVMVAAESGHADIFRLLVMAGADIAATSAEGKSAMSIIRSRAPETRDRFEQILLQASLADAIAGQQPSFRPLHYAARIGDTSSLTQLLKMGHDPNAMDEDGYTPLMHAAAAGKLEACRALVSRGGAADAGSETALSVARRSGRSNKATEEWLLDHVARAHVLAGEELTKHTRGGRGPPHRKAVRMMRSGVLTWGRPAGGTWPAGRPGRGPARRSGGTGGSSGRAARSS

SEQ ID NO: 54193 - protein, 741 aa, Oryza sativa
MERRDNFLQPPAAAAAPAAGGGKGLPVPATGDATNLTSSSSSTSSLTLSPPDFLRQVQAALKRHRPTGSMQSNQPRATRVLVSRGEGSTKAVANPSVAQNPEGKVMQQRRGLLGAYRLRNAAPDQNKAVVSSQDELLLTTPLTLGTITDTHDQNGGQNHQPKSDTDLLVDRKKSSMEVSSSQMASANALVGEDFKKDLFYLTSDPQLTSQRDNFPVAQVADDQGKNHKEIGIASAAVEMDIKYDAANLSRRIDEACDQNHGEPMTRCSAMGSSVTAVSLYSGPTIQSKSAAQIDQYASPAQMPQCGRESSGVSGHGSQKLHGVAMNHADCNTNKQQVDTNGGMDKPVSSSAVCLPSQGLSGNDQSLSAKDDGAPRRSKVEKECRKKNYDPDVFFKVNGKLYQKLGKIGSGGSSEVHKVISAECTIYALKKIKLKGRDYPTAYGFCQEIEYLNKLKGKSNIIQLIDYEVTDKSLLQDDSLSPRDGRIKDDHYIYMVLEYGEIDLANMVAQEWKKRNTSNMKIDENWLRFYWQQMLKAVNTIHEERIVHSDLKPANFLLVRGALKLIDFGIAKAIMNDTTNIQRDSQIGTLNYMSPEAFMCNEQDSGGNVIKCGRPSDIWSLGCILYQMVYGKTPFADYKNFWAKFKVVTDKNHKIKYEPVDNPWLIDLMQRCLAWDRNDRWRIPQLLEHPFLVPLVPRDLPSIDQDPCRLLMERVRVHWANPKLHSFIAELEKDQCRPATQM

SEQ ID NO: 54194 - protein, 173 aa, Oryza sativa; identical to SEQ ID NO: 38262

SEQ ID NO: 54195 - protein, 661 aa, Oryza sativa
MAAVAPGAGDQATDMMQKLSLESKKEGATPDATKKPAGMPYGSASAGDAQNAASPVDRSITPLLQEAVNANILYQTNGYGPSAYYYPTGYDGSANEWDSRYAAHDGTEMPPSVYGDMYGYGYAPYGPYPSGSPVPTVGHDGQSYGAQHYQYPGQYYQQPAPTNASHGVNAVNSQSEMPSVAAHQARVPVESAKASANGTANGMANTNSSSLARKQTHQNVSVLNNGSYGGGTLQGGPSANNYGHSGLHSPVQWYDGPVYSNGHQRSNTNSTSYGSNSYSAKNQSQRPTANLMGMHAQIPSSGMGLTSPSYHTRMYPDNRLYGQYGQYGNALKTGLGFGSNMYNSRNNGRWGIVDSKYKPRGRASFGFGSENQDGFTELNRGPRSGGFKHQKQFGPSVTIAVKGQALPSVGKQENSAIPDKGQFNQEGFPVTYKDAKFFVIKSYSEDDVHKSIKYNVWASTPNGNKKLDAGYREAQEKSSECPVFLFFSVNTSGQFVGVAEMVGPVDFEKTVDYWQQDRWNGCFPIKWHVVKDVPNNILKHITLDNNDNKPVTNSRDTQEVKLEQGLEMLKIFKDHISKTSILDDFGFYENRQKLMQEKRAKQQLLQGQGSLDNASHEKEKNAIDGKSTAQKQALSKEGTPIVGEMLNASKSAVESSVTNGN

SEQ ID NO: 54196 - protein, 217 aa, Oryza sativa
MEASSWDALRKQARRLEAQLDDQMIAYRKLVSMKSDGSENDIESDIERSLKQLQQENSQMQTWVSSGGSEVLSHTLTRHMEILQDLTQEFYRLRSSLRVKQQHASLLDLRDFDRAKFDVESGDSADQALLREQAAISRSSGQMDNVISHAQATLGTLMSQRSTFGGITTKISNVSSRLPTINHILASIRRKKSMDTIILSLVASVCAFLILVYWLSK

SEQ ID NO: 54197 - protein, 776 aa, Oryza sativa
MAAAADGLPPGVRFDPADDELVSRYLLRRLRKQPIPLHGVIHEADPLGAPPWMLLAAHGRGGDEAFFFAEARAKNVRGKRQKRTVEGGGFWQGQRVCIDGERLRVPGDGGGGEVGGELEIEWRKYMLSFFAEGERGSSGWVMHEYAITAPADLASSPIRLYRVRFSGHGKKRKREPERLGARVHDDDVDGGERAAPRRAVAETALFVQQSSAVDCAESADQSFSGVIEPVFHDLPDMMPEQADAGDTAETTAAVVNLTDAMTEQPVLPLAADGDDQSSYGVIDPAFRDLADLMVLPPVLAQQEPPLAPVAMVDLPPGNADCADHQSCSGVIDPAFRDLPDMTVLPPEQADTGGGAETTTAMVSLTDKLKYSSSMDGEAAPAWCDFDFPESTDEVLSYMNFTAGAHDNNDGSVGRAAPWRPVSEIAMFEQPSAVDLPPGDADCTESADQSFSGVIEPVFHDLPDMIREQADAGDTAETTAAVVNQNYSMALCDFDSGIDFTAGAHDSGMERATPWTPMSEAALFEQQGPPLAPAAVVDLPPGNADCADHQSSYGDMIVLPSEQAGAGGGAETTEALFDQPVPPLAADCANQGSYGVIDPVFRDLADLIVLPPEQADAMDGEAAPAWCDFDFPENIDEALSYVDFTAGAHADNDGGVSETAMFEQPGSPPQHDPLLMDADGADQSSSSGALIDTVFGDHAEPIVLPLEQADTGGGAAAAVKLMDKQKYSSSSMDGEEAPAWCDSDFPESIDEVLSYVDFSTDGASCDFSMDELFDLAD

SEQ ID NO: 54198 - protein, 86 aa, Oryza sativa
MVHHVPSTTCLVWILTCGMNLAFIFLFACLYNFMYTSLMIIEYCKCWISLFLQRGCSHMCRAQKCLVLVVIATYVLQYMLFPIMPS

SEQ ID NO: 54199 - protein, 797 aa, Oryza sativa
MITGGQSYVSAPPAFSADGRLLLACTGRTVSVFSASTGMLVSELEGHEGDVTAVVVAPPPVAAAAKLASYCWTAGLDGFLVYWDFAAAELVRKVQVGLPVHSMVIPNIARISRGAEIYTPFAFVSVEDTSKPSNEKLRGQLRIYDLTKGRQVGSLLAETRKPEMIVASSSGEFLGITNKRKLHVWRIPTKNFKPDKIRKIKLSHTKNLNTLAFHPSERIVASGDATGRILIWRGFGNAKFSGSDGTKSELDEDRGDVRGNGDADTCTTWHWHSSGVRFLKFSTDGAYLFSGGMEGVIVVWQLDTGKRRYKPRLGSPLLSFVDSPDSSIACVSCMNNQVHLLKMPNMEVMKSIAGIKLPISSPNLGGCYRDVYGFDYSNKLVAVPTEDYCIQFYDLFENTEVSEVQVCERNFHPVDDITMYISLVSLSIDGKFMCTIDVKLPEEELGGLVTLKFWNQGSRAGQYFLSTVIYEPHSDAGISAIAFRPGKNMAVSSSFGGNFKVWVQSMLSQPSDEKNQSGWRCQSVGSYKNKPMTAATFSSDGSVLAVAAENVVTLWDPDNNTLVGVIAEALSPITKLSFIGTSPFLMSLSQSSKPQVAMWNVPNLSMQWSYSLFAEAACCSSSRSEFAVLALLSCPDGETLAEQDGVILLFDAENPKPVSSWSVKKARGGSVAFLKGDSSLDANRKDRIDGEASSLVYVNGSHEYVIFDPRSNEELHIGKSAHKNIQTEEPGPIGYASIFGELPKLESKKDVPEILFIPSERPWETIFSGSTHVLPPLTKLCPAFLASLLEKRPVANV

SEQ ID NO: 54200 - protein, 68 aa, Oryza sativa
MSSDLLAIVVQNLKIGCNLVQELSGWEDLQCLKENSLTIDSVPRKDTVAELKNCLMNLVPLLPFDSSL

SEQ ID NO: 54201 - protein, 246 aa, Oryza sativa; identical to SEQ ID NO: 29576

SEQ ID NO: 54202 - protein, 194 aa, Oryza sativa
MAIECLVLGAGQEVGKSCVVVTFGGGKRVMFDCGMHMGHRDSRRYPDFDRLLADGAADYTAAISCVVITHFHLDHIGALPYFTEVCGYHGPVYMTYPTKALAPLMLEDYRKVMVDHRGEEEQYSYEDILRCMRKVIPLDLKQTIQVDKDLSIRAYYAGHVLGAAMIYAKVGDAAIVYTGDYNMTPDRQPWSSAN

SEQ ID NO: 54203 - protein, 205 aa, Oryza sativa
MVGPSLLAQGIYEEGQKSVSVYLPGEELWYDLRNGSPYKGGVSHKLEVSEDSIPSFQRAGAIVPRKDRFRRSSTQMVNDPYTLVIALNSSSAAEGELYVDDGKSYDYQQGAFIHRRFVFADNKLTSMNIAPKNLGNKKFSTECVIERIIILGVSSGSKKAIVEPGNHEVDIELGPISLRSGSSSVAPTVRKPNVRVVDDWTIRIA

SEQ ID NO: 54204 - protein, 161 aa, Oryza sativa
MASTYTAVCSATASPLTTTPSPSPSRPALRWPTTTAAAPSTATPSTRASRPTFSSPPPSSTCTSSALAYPTPPTSSPPCPPGISSPGTPCLPATRTMACTTTRLLTSSACRCRCIGSGPTPTPSWRSFRSLPSRGRSPRAPASTPTAFVPASTPTATARAS

SEQ ID NO: 54205 - protein, 201 aa, Oryza sativa
MARLRRGLEHLGRRYAFYAAYHSNPANVLVHAVCVWPILLTAMLPLRYAPPLPLLRFYCPLCRQYLPVQLGFPVAVALGAYYALMDRRAGAAAAALCVAGWAAGTLLADAAGLWTFRDAWRPLLTAQAVLWSAQFFSHAFFEKRRPALVDGPVQAVVTAPLFVFIEVIGRVRSSWSPCGDGDRQVFDLMRVRLLRVFAGAA

SEQ ID NO: 54206 - protein, 683 aa, Oryza sativa
MRALISLSKLTRRLLPSLAVARAPLPPLRRCLHAEPPPPPHHAPPPVASRILQSELTPGAGADADAEQEQQPAPDPLLDEFLARFVAALRPTLAAAFPTHARHVLDEMLRLVAEAVLCRLTGVEPEEGGAVELSDDLWAAVWEVSAAVRDGMQRDRVRAELRGYLHCEEVKEMTRFASDVGIRGEMLRELRFKWAREKLEEVEFYRGLDDMRAQAEAAANPVALPPPRLAALPQRKGEIKFKIHGLDLSDPTWGEVVERAAEAEAHFVPQEAKPIEGKAKKAEEKLMAVDPRKGDPAPAMEEWKEELLPKRADWMALLERLKARNVELYLKVAEILLADESFGATIRDYSKLIDLHSKANHVEDAERILGKMKENGIAPDVVTSITLVHMYCKVGNLEQANQAFQFLKGEGFPPDMKLFTSMIRAHLKSGEPKQAENLLREMERSIKPTKELFMDVILAFAQRGMIDGAERVKTSMLLAGFQLTPELYTSLIEAYGRGGHVGQAYTLFEQMRSSGHEPDDRCVAGMMVAYMMKNQLDHALSFLLKLEKDGLKPGVKTNLVLLDWLSRLQLVQEAEQVVQKIRKAGEEPLEMHVFLADMYAKSQQEERTRKSLKILEEKKKLLKAYHFERIIAGLLEGGFTEEANKYFKMMKSHGFVPSPTIEIGVKASFGVRGGVHPTGRHRG

SEQ ID NO: 54207 - protein, 305 aa, Oryza sativa
MAAAVSLASPFRRVLHVPFARRAIPTSYHFFPSGRCHAALSFAAAAAGDSAVKASLDRNAAEELRSILDMAQRASQRRDVFHTNFLTPPIVKECMLAIEKLADIKAVAQGGYPQAERCRVSVGHPDCMTSNPDVVAALSISGNFRLEPCSHGDFLGAILGAGITRDKVGDILLQGERGAQVLVDPELVDYLTSTLEKVGKVGVSCTQIPLLALEYEPPRTKSFKTVESSLRVDALGSAGFKISRTKLASLISAGDVRVNWSPVSKNGVTLKAGDVVSVSGMGRLKIGEIVTTRKGKYAVELIRYL

SEQ ID NO: 54208 - protein, 414 aa, Oryza sativa
MEMMASKNPTKTLLLLLLLVFFLSLACSQPLHSEPMSTTTTATQPAPPPPPPQSKIPHAEAGGAARLRRIVLGVLFGSLTGFLLSLAFLYAIRVAILHAKYAPAIVRGPVSFTPQISPKNLHSALPSAQPLAHGPNGKYYKLVLDNDVTVAVKRLEASRPEASPSSMPNVSKSDMRRVQRQLELLARVRHQNVMGLKAYVREADRLSLAYDFVPGGSLEDVMKRVRSLQVNLNWDARNRIAIGVAKGLRYLHFECTPRILHCSLKPSNVMLDEDFEPRLADCGVSRLIASGSADPELASSLYSAPECYQSSRYTDKSDVYSFGMILGVLLTGRDPTDHFFSGETGRGGLARWLRHMQQSGDAKDALDSSVLGEEGEEDEMVMAVRVAIICLSDLPADRPSSDELVPMLTQLHSL

SEQ ID NO: 54209 - protein, 264 aa, Oryza sativa
MNSKFQLILSTFVVIAAFTLLPRPCASIEFYRKLSSWSNGGATWYGAANGAGSDGGACGYQAAVDQAPFSSMIAAGSPSIYKSGLGCGSCYQVKCSGNSACSGNPVTVVLTDECPGGPCLSEPVHFDLSGTAFGAMANPGQADQLRAAGVLQIQYNRVPCNWGGVMLTFAVDAGSNPSYFAVLVKYENGDGDLSGMDLMQTGAGAAWTPMQQSWGAVWKLSAGAALQAPLSIRLTSSSGKTLVASNVIPSGWKPGASYTSTVNY

SEQ ID NO: 54210 - protein, 925 aa, Oryza sativa
MSRALLPRGSILLVLRPRVPSTPHRCFAIGAAAAVDGGETWRGQLRQGEGEGRSRAVKVSVWWDFQSCHLPQGANPCRVATRVTAALRDAGIRGPVDITALGDAYMLPRAVQEALAATGVAFSHVPSSGKGGPDQLFMADLTYWIAQNPPPAHFFLISGNKGLANILHRLRMSNYNVLLACPSADSSVLCSAATIMWPWDALVKGLDFSPKHFNQPPDGISFSWYGHYRGPLDDLFLNSESDDSMAESEDSLAESRDPKAFQPHTKSVKPPILPKSVANGVRQVLYSFPEGISLPNLRAELRKNHVFMDKGLFGFKNFSSLLQAMPDVVKFIDPLPGERNQPAVVGVSKRSMEPAEQIYKGKSSAQSSGEFKRLVQTLNEKPPSSHVPSSSSDILSADRKKVLAVDAPSSQSDLLSRNQEKAPPVDLTTQPETPASCMEADVESVAGASAFTGEQITVDKKGLFERICVLWNDTEPVKPMLSPSQDDTHSKGSNDLLTQYANSNEHNSLLTRTLKIFSTTDNSDGDNVDSTSAISSSFSNMTANDHSDKLNVKENVGNTIIHSSRSVDTSNAEHKVGFIEKSKGIFSWAAKWWASGKPDTDDNLSSVHINDGTREESEKESAFVKTAATASEQQVGVELFMKPYFWDALQQYLSTPHGSDLVSKAKTREELAHGLQKQGHWPLKSLGGKHHHQLVDLLISEKQWIKESSSQTSPFRLALPQRRARSPLLSFFTNGRPSGQRKHVDDRSPTLSRTSVHVLPTKNGKGQASCKSNENQSKSDDFLEKELGPVSDSGKPYRQNDKAVRHHPPTCSDDEFSDDENHEVVQEAGRDAAQSSLFKIIDSWNTSKTICSSKKQHGIGGIVDCSRINRGNGGDNSITENAEKATSLSKHSYMTSDSDSDSDEEKLFNSVLGSLQNAKNSSLPG

SEQ ID NO: 54211 - protein, 458 aa, Oryza sativa
MGISSESPNGSQQIVQKETRDETTPLLPVKVEEEGFHEFNGASFSGAVFNLSTTIVGAGIMALPASIKMLGIIPGILMIIVVALLTEASIDMLVRCSHQGKITSYGWLMGEAYGQWGRIALQASVVINNIGVMIVYMIIIGDVLSGTSSTGVHHRGILEGWFGAHLWNSRAIVLLATTLFVFAPLVSFKRLDSLRYTSALSVALAVVFVVITAGIAIIKLFNGTVAMPKLFPELDGLSSIWKLFTAVPVLVTAYICHYNVHSIDNELEDRTQIKPIVRTSLFLCSSVYIATSFFAYLLFGEGTLDDVLANFDANLGIPFSSVFDDIVRVSYAAHVMLVFPIVFFALRLNLDGLLFPTSRHISRDNKRFAIITISLLAVIYLAAIFIPSIWDAFQFTGATAAVLIGFIFPAMVILRDPYGIASKRDKILAVTVIVLAVLSNSVALYSDAMNIFRKEEEA

SEQ ID NO: 54212 - protein, 267 aa, Oryza sativa; identical to SEQ ID NO: 32274

SEQ ID NO: 54213 - protein, 315 aa, Oryza sativa
MGNSKTPQPSKKSRIMLSDTDGHQLDNDEFSSESASNQMVLFNPETVAKGQDELGENHSPSLQKSANNPNRGMPSIGAFTVQCAKCFKWRLIPTKEKYEEIRECIIQEPFECERAREWRPDVTCNDPEDISQDGSRLWAIDKPNIALPPPGWERQIRIRGEGGTKFADVYYTSPTGRKLRSLVEIDRYLLENPDYVAQGVTLTQFSFQIPRPLRQDYVKKRPKIVNPNDEASVVTTKSVKPEEVSPIAWAAPSVHQEGEAGERASHADEPPEAEELELTRKRKAESPLFEEAHSNHVSDEPKTKLEDTQNGGPSA

SEQ ID NO: 54214 - protein, 294 aa, Oryza sativa; identical to SEQ ID NO: 32297

SEQ ID NO: 54215 - protein, 345 aa, Oryza sativa
MIKRGTVKEQLSVDSVSRKINGSCPLMPEEVGLLLQALGYPSTTRIYLAGSETFGGQRILIPLRAMYANLVDRTSVCSQRELSDLVGPEAPLASDMAHPPPPKTEKELVDEWKRAGPRPRPLPPPPARPYYAHEKVGWYGWIGENDTEPDPSPVEFRRQAHRLLWDALDYFVSVEADAFFPGFHNDGSGWPDYSSLIMGHRLYQTPSGITYRPDRKTISALFENVSDHRYHPPRNWTLAARQHLNNSASVEGIVKSAMLSKPVSFLAHPLPECSCRTPKSPGVQSTKDSHGRLLFGGEEECPDWMVRSLAMVSTKNNEPQNEDYDGDLPEDDSSQDTQQESDRVT

SEQ ID NO: 54216 - protein, 247 aa, Oryza sativa
MAEFPSAKPPLGVFFAAVAPRLQPRYYSISSSPSMAPTRIHVTCALVHEKTPAGRVHKGVCSTWIKNAIPSEETKDCSWAPVFVRQSNFKLPADPSVPVIMIGPGTGLAPFRGFLQERLSQKQSGAELGRSVFFFGCRNSKMDFIYEDELNTFLEEGALSELVLAFSREGPTKEYVQHKMSQKASEIWDMISQGGYIYVCGDAKGMARDVHRVLHTIVQEQGSLDSSKAESFVKSLQTEGRYLRDVW

SEQ ID NO: 54217 - protein, 282 aa, Oryza sativa; identical to SEQ ID NO: 31760

SEQ ID NO: 54218 - protein, 489 aa, Oryza sativa; identical to SEQ ID NO: 50238

SEQ ID NO: 54219 - protein, 668 aa, Oryza sativa
MASETETFAFQAEINQLLSLIINTFYSNKEIFLRELISNSSDALDKIRFESLTDKSKLDAQPELFIHIVPDKASNTLSIIDSGVGMTKSDLVNNLGTIARSGTKEFTEALAAGADVSMIGQFGVGFYSAYLVAERVVVTTKHNDDEQYVWESQAGGSFTVTRDTSGEQLGRGTKITLYLKDDQLEYLEERRLKDLVKKHSEFISYPISLWTEKTTEKEISDDEDEEEKKDAEEGKVEDVDEEKEEKEKKKKKIKEVSHEWNVMNKQKPIWLRKPEEITKEEYAAFYKSLTNDWEEHLAVKHFSVEGQLEFKAILFVPKRAPFDLFDTRKKQNNIKLYVRRVFIMDNCEELIPEWLSFVKGIVDSEDLPLNISREMLQQNKILKVIRKNLVKKCVELFFEIAENKEDYNKFYEAFSKNLKLGIHEDSTNRTKIAELLRYHSTKSGDELTSLKDYVTRMKEGQSEIYYITGESKKAVENSPFLEKLKKKGYEVLYMVDAIDEYAVGQLKEFEGKKLVSATKEGLKLDESEDEKKRQEELKEKFEGLCKVIKEVLGDKVEKVVVSDRVVDSPCCLVTGEYGWTANMERIMKAPWQRTPVKSVRIVIGSTTYHSQVVMGQIVYMIGMLMSSLVTQNLALLSMVLLRVTTLSQGVLVDLRSAVWLKACLSKDF

SEQ ID NO: 54220 - protein, 388 aa, Oryza sativa
MKDPEYLEFLESISKPAEHLPSAEIQLERKEAERAAAGKEPPVVTPLMVYVRQQRAAKSMAQRSGSSRLSRKVAGVVTSSPSPSKRGSEKRRTSASTQYVLRENAKEKPTYILVPKRDEHAQREKDATSGGISGSAHVAENKKEKIVLLKGRARVDSNTSDVTSQQQSGTPMKNAAQSSSRQDPRLEGSGRIIKTILSNKEGRHVVTSQHDQEGHIITAEKRPPRIPNPRSVVKDQVVENAEKNHLDDKHSHLHGSGLISEKTERHARNRDRPDRGVWAPRRYDKSASGGTHSSSSEFSPMQQHSGENFCQQADGHGERKIDPRGHGGIRGGPVENGHRHANRRGPPRGLKEMEISASTSDGKPSKRASANYGAHERQVWVQKSSSAT

SEQ ID NO: 54221 - protein, 214 aa, Oryza sativa; identical to SEQ ID NO: 30213

SEQ ID NO: 54222 - protein, 557 aa, Oryza sativa
MPPKVVAVAAGEAHTLALTGDGEVYSWGRGMFGRLGTGREADEHVPTVVAAGGRPRPRFVAVASGAYHSLALDDEGSLWSWGYNIYGQLGYGEENSLFPCLVERFQDLGSPETLQSEAQNSSTQSSLKLSSVKAGGMMSFAIDTLGAMWMWGNCPQQTDAGEFCIAPSCVPLPVWDFHGHTVVKVACGNEHVVAAVSAGETYTGGDLVCYAWGNNNHGQLGLGDKESRSRPVLISAFSEGSSWEVYEIACGTWHTAVLTNKKSFDVDLESRCWTFGLGDNGQLGHGTTATICSPQPVDGLPTGSFLISLDCGLFHTTVVSSDGEVWCWGMERGLGLCPDASFSGVDSGDALRPIRVQSPETNGFKFLGAVQVTCGAAHTVLVAGDGYRMWAWGRGRSGVLGRNQTADSYIPCVVMWPPLDENFQEIHEDRAQASTSGVNDRNSAELEQKLSAASEELEFLRSKLTLMERYANILHISIFRKPLDERTLPRSLQESPVFDIRKEFENILDTAGTDELNRLEIFYRSMLSGVKDKLLKRRVQEMVQECIVSLSSGRQTP

SEQ ID NO: 54223 - protein, 421 aa, Oryza sativa
MNGQPRFHDMIGGGGKGMQDNEINGLFNMPSYHKFVEGSQMSVDSADGFNMANYVGGSVAMSVDNSSVGSNESRTVILKHPGLRDAPTASYSVGNSVFRPNRVAAHTLNEDALARVLMDPSHPTEILSNYEEWAIDLGRLDMGVPFAQGAFGKLYRGTYNGEDVAIKLLEKPENDPERAQALEQQFVQEVMMLSRLRHPNIVRFIGACRKSIVWCIITEYAKGGSVRQFLARRQNKSVPLRLAVKQALDIARGMAYVHALGFIHRDLKSDNLLIAADKSIKIADFGVARIEVKTEGMTPETGTYRWMAPEMIQHRPYDHKVDVYSFGIVLWELITGMLPFTNMTAVQAAFAVVNKGARPVIPQDCLPALSHIMTLCWDANPEVRPAFTDIVCMLESAEMEILSNVRKARFRCCITEPMTTD

SEQ ID NO: 54224 - protein, 669 aa, Oryza sativa
MEEKRIARISVTWRGRQLDVDADPSCTVKEFGQLLQDLTSVNPETLKLIVPQSTNKGSKLITPFSDPHSVLTLKEAAISDGKPIRMMGVFNDEIEEVSDNGKRTDLRIIGFEEEEQRLRQRTSGRPQVPLKLPQGQYIFCDFRTLHLPGIELNPPPSEALKRMHMLACDPGIIAIMNKHRWRVGIMTEMAPVGYVGVSPKCILGFNKNMGEEISLRLRTDDLKGFRKYESIKRTLLHELAHMVHSEHDANFFALNKQLNDEAASLDWTKSRGHVLSGRKIFDSYEDEFVLEPDSVVVGHKLGGGSSSLASARVLSGSAAYKRFLNASADLESSKDSVTIPGNEILVPNTKFEPDPDDVGQDFSQDNTKVEPDPDDNDDMNVDVGTGASWSSVSRSFTEQDTISHSEPDPDDIHQQSTAGCLEPDPDDSSNVDILSQELTIDGKQNGEPDPDDNGTSKFIPEPVNKMEVETELGSNFAVQNSEPDPDDSSNAILNKKLGTDRSDETTCEAVVEECVNKMEVETEQSRNSTMSKSEPDPDDHAANSNISELQRIEEPVAALCARLQKAIEMLRSQATPTEATSALQTLFKIIKNVIEHPHDIKYRRLRKSNPQFQRSVANYKAAMEVLELIGFCEDVVSDEIGRAETYLVLKRNDPGLLWLAKASLEVSMA

SEQ ID NO: 54225 - protein, 266 aa, Oryza sativa
MHAMWRPQKFKAIYLMATLYVLTLTLPSAASVYWAFGDELLTHSNALALLPRTAFRDAAVVLMLIHQFITFGFACTPLYFVWEKLIGLHDCRSLFKRAAARLPVVVPIWFLAIIFPFFGPINSAVGSLLVSFTVYIIPALAHMITFRSAHARENAVEPPPRFVGRWTGTFIINAFVVAWVLVVGFGFGGWASMTNFVRQIDTFGLFTKCYQCPPPPLPPAGAAPNATWPPFPATPFNATTAGLAPAPAPSPAHFFGRHHRHHSHGL

SEQ ID NO: 54226 - protein, 261 aa, Oryza sativa; identical to SEQ ID NO: 30771

SEQ ID NO: 54227 - protein, 577 aa, Oryza sativa
MIPPQSEIVGENNASKSAAKEQILSSTNEKMTTSVPQGASSSKSPKGAQEKASFLGKGGEQPFYQPNVYAPQPQTIYSGGYLNHLGQWEEYPHYVNMEGLHSVSPGIYNDNQSIMLSPGYANNPQMMYGAYSPGVGDGQPYLPLHFPFSSPYYQPPASPSMGYSNSATGMSQGDPMLQQEYFLPDGLLYSPTPGYHQPFGSFDRASTQPSSTPGLFGQGNTPLAFGMHHGSMYAPGSYKPRQQGGKFGGTTPSWSSGRRFGTFDLSANQQKGSMPFGIQNGALEFLNEQNRGPRATKPKKQDTENSSIDDKNEKNVPLVDSELYNRPDFVTEYKDAKFFVIKSYTEDHVHRSIKYNVWASTASGNRKLDSAYRLAKEKEDYCPIFLFFSVNGSGQFCGVAEMIGPVDFDKSVDYWQQDKWSGQFPVKWHIIKDVPNNLLRHIILENNDNKPVTNSRDTQEVKLEHGLQMLTIFKNHESETNILEDFDFYEQREKALQENRRQQQPASPELQKPAENKALGELMAHISDTFGQTVQLKETENGESKPAVEGVSSADEASTATTKAEDGTASTNASPVE

SEQ ID NO: 54228 - protein, 470 aa, Oryza sativa
MDRPYPPLLPLALLALLFLCLLHGERAAAADDDLTSGTGDGSELWGYVQVRPKAHLFWWYYKSPQRASSPGKPWPTILWLQGGPGASGVGLGNFLEVGPLDVNLKPRDSTWLQKADLIFVDNPVGVGYSYADDPSALVTTDWQAATDATELLRALAAKEIPTLQSSPLFLVAESYGGKYAATLGVSLARAIRAGDLKLNLGGVALGDNWISPEDFTLAYTPLLLEVSRLDDNAGDEASKMAATVKEQITAGQLADSQQSWIDLLGFIDKKSASVDMYNFLLDSGMDPVSADLPAASSSSPSSSSAQLMKYSTYLSSQAADSGSNTIEGIMNGVIKEKLKIIPNNLKWQELSDPVYNALVNDFMKPRINEIDELLSYGINVTVYNGQLDVICSTIGAEAWVKKLKWDGLKNFLSLPRQPLKCGSSKGTKAFVRSYKNLHFYWILGAGHFVPADQPCIALSMISSITQSPAS

SEQ ID NO: 54229 - protein, 698 aa, Oryza sativa
MAAAGGLPASATLLLLVIAAVAVAPLASAVRPVSDAHRSAAAELFAASPDGSFGDLETTYEAVRTFQILGVEKDKGLIGKACKFAAEKLASSSSSPAKDLFHAARISGVLKCSVDSGVYDDVATRLKAVIKDTNSLLELYYSVGGLLSIKEQGHNVVLPDADNTFHAIKALSQSDGRWRYDTNSAESSTFAAGIALEALSAVISLADSEVDSSMIAVVKNDIVKLFDTIKSYDDGTFYFDEKHVDAAEYKGPITTSASVVRGVTSFAAVASGKLNIPGEKILGLAKFFLGIGLPGSAKDCFNQIESLSFLENNRVFVPLVLSLPSKVFSLTSKDQLKVEVTTVFGSAAPPLRVNLVQVLGSDSKVITTETKELQFDLDNNVHYLDIAPLKIDVGKYSLVFEISLQEQEHETIYATGGTNTEAIFVTGLIKVDKAEIGISDNDAGTVESVQKIDLQKDTSVSLSANHLQKLRLSFQLSTPLGKTFKPHQVFLKLKHDESKVEHLFVVPGSARQFKIVLDFLGLVEKFYYLSGRYDLELAVGDAAMENSFLRALGHIELDLPEAPEKAPKPPAQAVDPFSKFGPKKEISHIFRSPEKRPPKELSFAFTGLTLLPIVGFLIGLMRLGVNLKNFPSLPAPAAFASLFHAGIGAVLLLYVLFWIKLDLFTTLKYLSFLGVFLVFVGHRALSYLSSTSAKQKTA

SEQ ID NO: 54230 - protein, 601 aa, Oryza sativa
MASTFGATSTVGLMAAPTGIVSDKKPSSLSSVSSVSVASRPRNARLQRKCNFRVKAAKELYFNKDGSAIKKLQTGVNKLADLVGVTLGPKGRNVVLESKYGSPRIVNDGVTVAREVELEDPVENIGAKLVRQAAAKTNDLAGDGTTTSVVLAQGLIAEGVKVVAAGANPVQITRGIEKTAKALVEELKKLSKEVEDSELADVAAVSAGNNYEIGNMIAEAMSKVGRKGVVTLEEGRSSENNLYVVEGMQFERGYISPYFVTDSEKMSAEYENCKLLLVDKKITNARDLINVLEEAIRGAYPILIIAEDIEQEALATLVVNKLRGSLKIAAIKAPGFGERKTQYLDDIAILTGATVIRDEVGLSLDKADKSVLGTAAKVVLNKESTTIVGDGSTQEEVTKRVAQIKNLIEAAEQEYEKEKLNERIAKLAGGVAVIQVGAQTETELKEKKLRVEDALNATKAAVEEGIVVGGGCTLLRLAARVDAIKDNLENDEQKVGAEIVRRALSYPLKLIAKNAGVNGSVVTEKVLSNDNFKFGYNAATGQYEDLMAAGIIDPTKVVRCCLEHAASVAKTFLTSDVVVVEIKEPEPAPVTNPMDNSGYGY

SEQ ID NO: 54231 - protein, 333 aa, Oryza sativa
MTSSMSKSDKKKVLDFAAWSFNITTSVGIIMVNKALMATHGFSFATTLTGLHFVTTTLMTIVFRWLGLSQPSHLPIPDLIKFVIFSNLSIVGMNVSLMWNSVGFYQIAKLCMIPASCLLEVVFDRVHYSRDTKLSIMVVLIGVAVCTVTDVSVNAKGLAAAVIAVWSTALQQYYVHFLQRKYSLNSFNLLGHTAPAQAGSLLLVGPFVDFLLTGKRVDHFGFTSIALFFLTLSCVIAIGVNLSQFICIGRFSAVSFQVLGHMKTVLVLSLGFLFFGKEGLNFQVVLGMILAVVGMIWYGNASAKPGGKERRSVLPVRSEKPNGALDEKDGSEK

SEQ ID NO: 54232 - protein, 233 aa, Oryza sativa
MFFLYKLVKHKTSLLTYEKCAKLVIIIYSCLYNLIFEVSKQSHKSTHDDVGTSLDNELVRAPTNETKERLQSKLARAREKYATLTPEQKQAKVDQRRTQRQSLTKEQRLELNARRRVARQSMPDVEIHDMNACRRSRRQNVTPGERSAHLARRNALYAARRDKPCAESIALECPEGSIPLLLNPTPCLETTGDVPSTSSLQTEHAVDHQARSCTFNDGIIYICFHSYSQFGGI

SEQ ID NO: 54233 - protein, 117 aa, Oryza sativa
MTTARCLRRRLPSSPPPLLATTRDDDGSPPRCLRHRHPSSPPPPLATTCNAPARLLAASVANFPPRCLRRQPRRATTTARILAASAAAAGSPPRRCDDDDEERADATMTTLRRRQRR

SEQ ID NO: 54234 - protein, 539 aa, Oryza sativa
MVQGEESSWRMAASTHHERAIPLNQALAYGVQAHASPSVAAAPPASFLDFQPAAAAAAYFGELEEALIHGANAGGVVDPGMIRADVHSKSAAAAATAGYLAARPPTLEIFPSWPMRQQQQLHSGNSQSVGSTTDSSSAQNTMPQMELVSPASIRASSEHQHQQQQPGQEVMMVTTDDYSYKPGLAAASPSFQQQHQLQHHQQQQLHGGGDHDKRKHGSTRKDGKSVDAKTERRLAQNREAARKSRLRKKAYVQNLETSRVRLQQIEQELQRARSQGLFLGGCRAAGDMSSGAAMFDMEYARWLDDDSKRLTDLRGGLQAHLLDTNLGLIVEECMQHYDELFQLKAALARSDVFHLLTGTWATPAERCFLWMGGFRPSDLLKILIQQLDPLTEQQMLGIYSLQQSSEQAEEALAQGLQQLHQSLADTVAAGTLNDGPGVPNYMSLMAIALDKLASLESFYQQADNLRQQTLHQLRRILTTRQAARCFLSIGEYYRRLRALSNLWSSRPRENFIGTESVSPTGTELQPMHNQPQQNQYSGF

SEQ ID NO: 54235 - protein, 901 aa, Oryza sativa
MDIVPVVALCCCLVLLPSWAYGLGSMASIAVSYGEDGPVFCGLNSDGSHLVTCFGADASVVYGAPSRIPFVGVTAGDGFACGLLLDTNQPYCWGSNSYVKIGVPQPMVEGAMYSELSAGDNHLCALRTSVKGFHSLNGDTSVIDCWGYNMTATHTVTGAVSAISAGSVFNCGLFARNRTVFCWGDESVSGVIGLAPRNVRFQSIGAGGYHVCGVLENAQVFCWGRSLEMQQMSTPSSTDDGDVNIVPMDAMVSVVGGRFHACGIRSLDHQVACWGFTLQNSTLAPKGLRVYAIVAGDYFTCGVPAETSLKPMCWGHSGPLALPMAVSPGICVSDSCSHGYYEYANHGEVGSGSKTCKPANSRLCLPCSVGCPDDSYESSPCNATADRVCQFDCSKCASDECVSFCLSQKRTKNRKFMAFQLRIFVAEIAFAVILVFSVTAIACLYVRYKLRHCQCSKNELRLAKNTTYSFRKDNMKIQPDVEDLKIRRAQEFSYEELEQATGGFSEDSQVGKGSFSCVFKGILRDGTVVAVKRAIKASDVKKSSKEFHTELDLLSRLNHAHLLNLLGYCEDGSERLLVYEFMAHGSLYQHLHGKDPNLKKRLNWARRVTIAVQAARGIEYLHGYACPPVIHRDIKSSNILIDEDHNARVADFGLSILGPADSGTPLSELPAGTLGYLDPEYYRLHYLTTKSDVYSFGVVLLEILSGRKAIDMQFEEGNIVEWAVPLIKAGDISALLDPVLSPPSDLEALKKIAAVACKCVRMRAKDRPSMDKVTTALERALALLMGSPCIEQPILPTEVVLGSSRMHKKVSQRSSNHSCSENDLVDGDDQRIEYRAPSWITFPSVTSSQRRKSSASEADMDGRTTTDGRNVGSSIGDGLRSLEEEISPASPQENLYLQHNF

SEQ ID NO: 54236 - protein, 656 aa, Oryza sativa
MKQRREEEKKKKDILAGSDNESDGGGGEEDLSKIQINEEYARRFEHNKRREALQRLEERKKKGLVPPEEEEEEDDDDDESLSDDDDAAIASRRVDRQMFEVIRRIRRGDAAILDAKAKMYSSSSESEPGDEEGEKPKKTKKERPLYLKDVNARHLLEEGPEFAAQASHGGHSSSKYDKIAYDEQQRKGLEAFLAAEKAALGNGDGDGGEDDDDLFQVKPKGGDGGNKEDDDEEKKETEQILIDIFGKDEELDENSKFLKKFFLERPYLETGSEKKYSPDDIQEVSDEEEHLIEQEDYETRYNFRHEEAAATGADVMDRVMGHSRFVEGSVRKKESSRKQQRKNKEERIARAKQEQAEELKRLKNLKKKEIAEKLERIRMIAGIDSDAACKLGADDLEEDFDPEEYDRKMKETFNDNYYEADDVDPEFGSGEEIDLEKPDFDKEDELLGLPKDWALDGQDGSSAAAEGASQKKKGGKDIANGEGTNQKMKGKISLKDKVELEKEMEEYYKLDYEDTIGDLKTRFKYKQVKPNSFGLSTYEILASDDKDLNQYVSMKKIAPYREAEWKVTHHKKLIKDSILGGQDKEGKKVKKKKSKSEEGPASSEPEKELPNEQGDADGKAKSTRSERRKRRRRELKMTTERQAAYGKINPKRHKSH

SEQ ID NO: 54237 - protein, 749 aa, Oryza sativa
MDPPYAGVPIDPAKCRLMSVDEKRELVRELSKRPESAPDKLQSWSRREIVEILCADLGRERKYTGLSKQRMLEYLFRVVTGKSSGGGVVEHVQEKEPTPEPNTANHQSPAKRQRKSDNPSRLPIVASSPTTEIPRPASNARFCHNLACRATLNPEDKFCRRCSCCICFKYDDNKDPSLWLFCSSDQPLQKDSCVFSCHLECALKDGRTGIMQSGQCKKLDGGYYCTRCRKQNDLLGSWKKQLVIAKDARRLDVLCHRIFLSHKILVSTEKYLVLHEIVDTAMKKLEAEVGPISGVANMGRGIVSRLAVGAEVQKLCARAIETMESLFCGSPSNLQFQRSRMIPSNFVKFEAITQTSVTVVLDLGPILAQDVTCFNVWHRVAATGSFSSSPTGIILAPLKTLVVTQLVPATSYIFKVVAFSNYKEFGSWEAKMKTSCQKEVDLKGLMPGGSGLDQNNGSPKANSGGQSDPSSEGVDSNNNTAVYADLNKSPESDFEYCENPEILDSDKASHHPNEPTNNSQSMPMVVARVTEVSGLEEAPGLSASALDEEPNSAVQTQLLRESSNSMEQNQRSEVPGSQDASNAPAGNEVVIVPPRYSGSIPPTAPRYMENGKDISGRSLKAKPGDNILQNGSSKPEREPGNSSNKRTSGKCEEIGHKDGCPEASYEYCVKVVRWLECEGYIETNFRVKFLTWYSLRATPHDRKIVSVYVNTLIDDPVSLSGQLADTFSEAIYSKRPPSVRSGFCMELWH

SEQ ID NO: 54238 - protein, 356 aa, Oryza sativa
MVAPATPRPSRILPRASHSHSQPAAVGLASDRAAAATVSSRRRRNFVFVVNPSGANGRTGNQWKQLLPHLRTRFADQCDICECITSAPFDAIDITREAVKDGADAVIAVGGDGTLHEVVNGFFCKGSPVHALDQGPDHSTALGLIPLGTGSDFARTFGWTNDPHEAIDRIVRGVKSKLDIGMMEGPDGNPHYFVNVADIHLSAKAGYFSSMYKRFGNLCYVFGALRAFWGHSNRDLRIKVNGGEWKTIRKVTALCIGNAKYFGGGMKITPTADPFGGDLEVVILQDFKWHDFLLKLHRLYGGTHLSVTGVSSIRVQSIEVAEKEVSADIFVQSDGEHFGFLPTKFSVLPGAVDFFC

SEQ ID NO: 54239 - protein, 96 aa, Oryza sativa
MEKTMQMVQMPLQLMLQLHLVRFYQRDYHLNQEQEIHLARLKYQQRIEWLAPCWIFMQIMTKTAYPHQLEIVNHLLMCQSPLDMEHFQWHLTDHRF

SEQ ID NO: 54240 - protein, 292 aa, Oryza sativa
MEQYEKVEKIGEGTYGVVYKGKHRHTNETIALKKIRLEQEDEGVPSTAIREISLLKEMQHRNIVRLQDVVHKEKCIYLVFEYLDLDLKKHMDSSPDFKNHRIVKSFLYQILRGIAYCHSHRVLHRDLKPQNLLIDRRTNSLKLADFGLARAFGIPVRTFTHEVVTLWYRAPEILLGARHYSTPVDMWSVGCIFAEMVNQKPLFPGDSEIDELFKIFSIMGTPNEETWPGVASLPDYISTFPKWPSVDLATVVPTLDSSGLDLLSKMLRLDPSKRINARAALEHEYFKDLEVA

SEQ ID NO: 54241 - protein, 281 aa, Oryza sativa
MPGDPVPDQPDHRVPAPVRVGAVREALPPRVGSRRAGGARVVPHGEPHHVPPAPRPLRRRLLVGAARRRSPPGRAVRAPLREPHARPPAPAPPPPPRAGARSDPRRRLRLRLQPPQRLRPGALLGARRRRSPQHRHRHRHARGRRPLPRRASPLRVGDADQHRGGQGAPEAEGGRERVPDSPRRAVRRGHLPQLLRRGRGVARLRAGGVDAGGLGLLPLHLLQPRAEGQGSPPVVRRQVRRQVPGVAQGVRPVHLLIPLLLLMDTYRPGSDAHCASPRNSF

SEQ ID NO: 54242 - protein, 155 aa, Oryza sativa
MSPASIPTSCKSGEVDFGVEEVGGVEELANLESARRRSGVCRWRRLQYEATSASFLPMGGRFDERAARYAAPSSFFFPATRLFSFQHRVSNVPPPHAAPLLRPSPCVGSRLPSPPPVLLLPLHSPPHGRTGSFRVAVAGGGHDLVELSRFGGFGE

SEQ ID NO: 54243 - protein, 323 aa, Oryza sativa
MEEGSNYYLVRKGEMVAVYKSLNDCQAQICSSVSGPAASAYKGNSWSREKEEYLSSRGLSNATYVINAAELREDLFGTLIPCTFQEITVSSSNQSALNHTGVLNNTRYQPGAQSVDLNYDAVGSGQASAEHYSQRINQGYSVRGQAFNRLESRPSSSSHFSPNNLDQSGTVDAQPLSKQYMVCLLHFDGASKGNPGKAGAGAVLMTEDGRVISRLREGLGIVTNNVAEYRGLILGLRYAIRHGFKKIIVYGDSQLVCYQVKGTWQTKNRNMMELCKEVRKLKENFVSFEINHIRREWNAEADRQANIAITLSSGVVSEERGDG

SEQ ID NO: 54244 - protein, 267 aa, Oryza sativa
MCTLEQRGRVFVLTLTGDGEHRLGHSLIGSIRAAVSSVAAAAAAAGPGAALVTVAEGRFFSNGLDIGPGGIPPSRVGELVVALRPLAADLLALPMPTVAAVTGHASAGGFLLTLCHDYRLMRADRGVLYMSEIDIGLPLPPYFVAILRAKITAAHALRDVTLRGRKLKAAEAKEMGIVDVVCPTAAETAAEAVKLAEQLAARKWNGNVYSSIRISMFPEAAGPSELSRRAMRRRGITLLLSYEDVKGILWKWTIELFSTLCVHWLAK

SEQ ID NO: 54245 - protein, 1014 aa, Oryza sativa
MRRERIDATSVEAAVESLIPYLEDTSSAAHKSIYFDGWDGLGASAVLRAIAENPAPSLRKKFDRIIHVDCSRWKKRRQLQRAIADQLKLPQHVMDLFDRQDEEDDFSGVEESSRAEVTDIGKEIYQTIKDLSCLLIFHNGSDDTVDTSKLGFPLYDWSDNKVLWTFRGRLRLIPKIADNVDSSHLNIYSHYYYHFYSFESLNDLLPREAEEITQYSGELHLDGTKAAECCLYLLSLNYRGGHIMDYNWATHACNYWVCDGIITVQEEKGGGSLQEDQAWELAAALHQEIRLEDYSSNRVPGFGHYLDTPPNRWVLVTQESDMKDKPTLETTSLFIAFQSVVLLPDDMFHQANKVQVLRLCNCAFNFSSPPFHCCHNLRFLGLDKCQDHRTQEAGEDKSNTSSALEFFQRLWVLDICYIDWELPFPTESTREQQMAMNIREVHINKGRIWRRNFAWRRLKNLRKLRVIEPTHPWGNKGEIDEFADMLKLEIVDLSKNTMIQVLPSLCGASSLKTLILDDCVVLEQVGPQGLPPSLESFSFASREGNKAKISSISLAGCSSLVNFTLRGPLQNLRGLDLSGTMIKMLDLRDVQDSCIGQIILLRCEKLCTILWPEKGFPNLSMLHIDSLVCHVETEQQQAYATVMDLRFVQSLVLRSNNKFCWNCNKTHINICISSTPKDATPKKKTMSYYSAQKVVGSPLHMPIVTTIQPVVCYKDVNLAMISAIELEGSSAPRHEPLDIHVEIGEGISYANVVSEQALSAVSFMMNKAKSLHVHDNFSITSVNPKHVILTEDKEITWYCLKRCHIERCHKLNTVFSTDYIKYRFQTLEAFSAAELMMANCIWSRGRTFPGWNSNMFAKLRSIHLHYCPRLTFVLPLSWPTPYSHLPSLETLHIVYCSELRQIFPVEAVALREQPRGVLRFPKLKHIHLHDVPKLHQICEISRMVAPVLETIRVRGCWALKRIPAINGRPIVDCEKDWWEKLEWEGMNVGHDPSLFEPRHSMYYKKALPRCSLLR

SEQ ID NO: 54246 - protein, 282 aa, Oryza sativa
MGRKRRARVSRDGDGEEEEEPAPVAAESESLYEILGVERTASQQEIKKAYHKLALRLHPDKNPGDEEAKEKFQQLQKVISILGDEEKRALYDETGIADDDALVGEAADNLQEYFRAVYKKVTEADIEEFEAKYRGSDSEKKDLKDLYTKFKGNMNRLFCSMICSDPKLDSHRFKDIIDEAIAEGELKSTKAYDKWAKKISEIEPPTNPLERRVKKNKKKSEENDLILAISQRRAQRKDRFDSVLSSIMSKCDPKGSSSSEPTEEEFEQARQRLEKKRSKNRK

SEQ ID NO: 54247 - protein, 1004 aa, Oryza sativa
MAEAKGKPTSTKKGRKAAASAVAVGDDIDSLKSDVASFASSLGFLGAAAASSGFDDSDFRKSGPIIPPKTSKSAQTTDAPPNPKPTTTTTKKPHPLDIHGTNATTKSVSGAVTTNYPLMKATALSGQWYADAGELEASVLGARKQVLPSVGLQEMQRISEGKRQLAEKLMAQYTVEYDMVKRGSGDLKLLEISAKSGTSADKVSAFTCLIEDNPIANMRALDSLLGMVTSKVGKRYAFTGFDALKELFLKRVLPDRKLKSLIQHPLDILPETKDGYSLLLFWYWEDCLKQRYEKFVIALEDALKDMLPNLKDKAMKTVFILLKEKAEQERRLLTALVNKLGDPERRAASSAAYLLTSLLSAHPNMKMVVIDEVDSFLFRPHVGLRAKYQAVNFLSQIFLTSKGDGPKIAKRLVDVYIALFKVLMSCSRATEGVKHSKYGKKTNENGKKEKGNDFNSHVKHEDPCAGSDLEMDSRILSALLTGVNRALPYVASSEVDDIVEVQTPILFRLVHSVNFNVGVQALMLLYQISTKNQIASDRFYRALYAKLLSPASVTSSKPELFLGLLVKAMKNDVMLKRVAAFAKRLLQVALQRPPQYACGCLFILSEVLKAKPPLWAIVLQNESVDDGIEHFEDIVENTDCPAITSRTTDKCNDILATLEKCNSDAEDACDTIECVSPISSGEKDGKGTSAEGLTLQASYNPRHREPSYCNADHASWWELTALALHVHPSVSTMARTLLSGNNIVYSGDPLTDLSLPAFLDKFMEKKPKGNRIAEGKWHGGSQIAPAKKLDQSHHLIGEELLELVEKEVPPEDVVFHRFYMNKTGPIKPKAKKKTAVLDEDTGELFADDVDDASDESDDEMQELGIGSIEDGEYDYDNLDATTFEEEGDLLRYDSDVELHDISDDISSGADSDTEALEGANHSDGNDSDGEEPVQGQKRKHGAKSGASPFAKLEDYEHLMDGEAEKPTFKKGRKHRVTRDSKEKRKGLSSKEKSGSRKKRSKRSE

SEQ ID NO: 54248 - protein, 412 aa, Oryza sativa
MILCLTMLMITLTVSHLHLSQRLQAMSMRLQSLELPSAENVNDNVENLPANDSSPEENVLVEACTEVVSSCAENIPAAAPAPAPRASTQKDVTKQSYASVVKVTKEGTPTPPVAKPKPKPKPKPTAKVTDNVEKAVSSPVKPTNAADTTSPNDKNVLVEQGYSVYVKHLPYECTTKDVEEKFRKFGAIRPGGIQVRHRQPDGFCFGFVEFESRQSMLAAIEASPVSIGSKASIVEEKRTTTRVVNGVTHIENNGNARGGRFQQDNRGGGYRGDNFRGREAGFVNNGNYRDGDNMRNGFRNQNEYSGRGRGPQGNGYHQNGNGGGYHQNGNGYHQNGDGYHQNGNRYNQNGNRYHQNGDEYYQNGNGNGHRQNGSGYYHQNGNGYRQDRIFHNGNGNGRPARFNGPRQTPVQA

SEQ ID NO: 54249 - protein, 107 aa, Oryza sativa
MSGPPRYLELQHKENVVTTAEVFIQTQWLYLQHVMRCRQKVWQTGTPIQVAHRDQISVRHPDAGSATLERHLGDSGNCQQCAVQTCMCRPCVHLHRVLRLSDRVHDH

SEQ ID NO: 54250 - protein, 230 aa, Oryza sativa
MLVMDEADKLLAPEFQPSIEQLIHFLPANRQLLMFSATFPVTVKDFKEKYLPRPYVINLMDELTLKGITQYYAFVEERQKVHCLNTLFSKLQINQSIIFCNSVNRVELLAKKITELGYSCFYIHAKMLQDHRNRVFHDFRNGACRNLVCTDLFTRGIDIQAVNVVINFDFPKTSETYLHRVGRSGRFGHLGLAVNLITYEDRFNLYRIEQELGTEIKTIPPQIDLAVYCQ

SEQ ID NO: 54251 - protein, 457 aa, Oryza sativa
MMELEKNGNILLRRYEIGKLLGQGTFAKVYHGRNIVTSQSVAIKVIDKDKIFKVGLMDQIKREISVMKLVRHPNIVQLYEVMATKSKIYFVLEYVKGGELFNKVAKGRLKEDAARKYFQQLVSAVDFCHSRGVYHRDLKPENLLVDENGNLKITDFGLSALAESRRQDGLLHTTCGTPAYVAPEVISRKGYDGVKVDTWSCGVILFVLMAGYLPFQDSNLMEMYRKIGKAEFKCPAWFSSDVRKLVSRILDPNPRSRMPITKIMETYWFKKGLDSKLILKNVETNEPVTALADVNVVFSSMGSSSSKKTEEKQDAGKLTNLNAFDIISLSEGFDLSGLFEETDKKKEARFTSSQSASAIISKLEDVASCSKLTVKKKEGGVLKMEGASEGRKGVLAIDAEIFEVTPSFHLVEIKKNNGDTLEYQHLWKEDMKPALKDIVWAWQGERQDQQPEDHGQP

SEQ ID NO: 54252 - protein, 949 aa, Oryza sativa
MAGMAAAAAALVAAKRCMNAACGAPAPSPAGGEWRKGWPLRSGGFAVLCDKCGLAYEQLVFCDIFHQKESGWRDCSFCGKRLHCGCIASKNSFDLLDSGGVQCVTCIKNSAVQSVPSPVVPKLFSSQNNQRLFGKSDDLLSGRPLETSSLMVDARNDDLTIIAKNNLPFMVKNVEAGQSSNILRQKELENGARQIKWELPTLSIGDMGRIPFLTRSQSALESRRDENKDPTTESTTSESLSEACLNMSLGIASNGNKLEATSTVERPMLSPTTGFPEGRELTTALSPFQHAQRARHFLTRPPRVGEGAVFDPTKDMLPHLRVARPPAEGRGRNQLLPRYWPRITDQELQQISGDSNSTIVPLFEKVLSASDAGRIGRLVLPKACAEAYFPPISQPEGRPLTIQDAKGKEWHFQFRFWPNNNSRMYVLEGVTPCIQSLQLQAGDTVTFSRIEPGGKLVMGFRKATNTVSLPDSQISAIANGSILGDTLFSSTNENLAIVSGYSGFLQSIKGAADLHTSSIYDHHVNSADGDVSWLKTDKFGSRPDEGSLQFLKRGRNIGSKSRRLSMDAEEAWELKLYWDEVQELLRPAPTAKPTVVMIEDYEIEEYDETPVFAKRSIFTIRSTGEQDQWIQCDDCSKWRRLPLNVIVASKWTCADNTIDSKSCSCSAPEELTPKELHIVLQQYEDMRRRRNSFGFKQNIPEMDAVSLDAFATAAVYGDVGNQGSPSVATTTKHPRHRPGCTCIVCIQPPSGKGPKHNPACTCNVCMTVRRRFKTLMMRKKQRQSEREEAEASKKIAWMNRDEPEGSSLSRSPQTVDTTRDGDVTMFDKVDINKGHIDLNFHPTAVRDEERHGGQPRVSMVSLLEVANRPLENYMKQNGLTSLAGEQGSSSTCTGAATVPQPALVESEERTSNNDGGRVATAEQPESMAVDEAGDNQPDKAAGDSAAALA

SEQ ID NO: 54253 - protein, 286 aa, Oryza sativa; identical to SEQ ID NO: 37090

SEQ ID NO: 54254 - protein, 437 aa, Oryza sativa
MAKHSTTMSCLLFFVLLCLGSHLAQAQVLFQGFNWESWKKQGGWYNFLHSHVDDIAATGVTHVWLSPPSHSVAPQGYMPGRLYDLDASKYGTGAELRSLIAAFHSKSIKCVADIVINHRCADYKDSRGIYCIFEGGTPDSRLDWGPDMICSDDTQYSNGRGHRDTGADFGAAPDIDHLNTRVQTELSDWLNWLKSDVGFDGWRLDFAKGYSATVAKTYVDNTDPSFVVAEIWSNMRYDGNGEPSWNQDGDRQELVNWAQAVGGPASAFDFTTKGELQAAVQGELWRMKDGNGKAPGMIGWLPEKAVTFIDNHDTGSTQNSWPFPSDKVMQGYAYILTHPGVPCIFYDHVFDWNLKQEISTLAAVRSRNGIHPGSKLNILAADGDVYVAMIDDKVITKIGTRYDVGNLIPSDFHVVAHGNNYCVWEKSGLRVPAGRRH

SEQ ID NO: 54255 - protein, 170 aa, Oryza sativa
MDDIMNKLGGYWLGQKANKEISSAGDDIESLSASVGEGAKWLVNKLKGKMQKPLQELLREHDLPEGLFPREATNYEFSPETRRLTVHIPAACEVGYRDGSVLRFDATVCGTLEKGRLAEVEGLKTKVLVWARVTAVRADAAKVHFTAGIRKSRSRDAYEVVRGGIIVEEF

SEQ ID NO: 54256 - protein, 496 aa, Oryza sativa
MAARWCFALLLALSAAAAGAGAKRTWEPVIRMPGEVVEEEVATVPRGSEGTEEEEKDGVGTRWAVLVAGSSGYGNYRHQADVCHAYQILRKGGLKEENIVVFMYDDIANNILNPRPGVIVNHPQGEDVYAGVPKDYTGDEVTEKNFYAVLLGNKTAVTGGSRKVIDSKPNDHIFIFYSDHGGPGVLGMPNLPYLYAADFMKVLQEKHASNTYAKMVIYVEACESGSIFEGLMPEDLNIYVTTASNAEESSWGTYCPGMEPSPPSEYITCLGDLYSVSWMEDSETHNLKEESIKKQYEMVKKRTSDMNSYGAGSHVMEYGDRTFKDDKLYLYQGFDPANAEVKNKLSWEGPKAAVNQRDADLLFLWRRYELLHDKSEEKLKALREISDTVMHRKLLDSSVDLVGKLLFGFGNGPSVLQAVRPSGQPLVDDWDCLKRMVRIFESHCGPLTQYGMKHMRAFANICNNGISGASMKEASIATCSSHNSGRWSSLVQGYSA

SEQ ID NO: 54257 - protein, 77 aa, Oryza sativa
MVEICRSSTTVVASKQSSPSPSSSAGASQGETLPRGSEMIPPAVTVAESSRWKEQQHQQQAVPWAKLLSQSSRRCMP

SEQ ID NO: 54258 - protein, 269 aa, Oryza sativa
MGYLPSSLGSKAAHFVSDLTTVILNPISEREPSSPLPEVDKDEEKSEDDKDSEQNSDTPDGPDTSSFRAFLISFLSSSGSSNGSMEIIPDQNGELGYPTLTPMGKSKKGKSGLLSRGKHSIGKIISKAARIGGFKQNVEPKIDREVVDHVESVSPVLELEESKEVASFINLPAMSEPSVLLSEVMRFNIYASFPVLAKGMNWVLLYSTWRHGISLSTLYRRSMLCPGYSLLVFFFCSLKLFDFYSLTGTPRPAASVPIYILKFQIFLRG

SEQ ID NO: 54259 - protein, 487 aa, Oryza sativa
MDDSTDDDSYHPRKHYAYDRQVSSSRWRTSREYIRGPGPETHTTESAQDGQDPPAGVYSYGYFSGSGNDPQVQGHFVPEIQKYNPYVIFKGEQLPVPIWELPEEKVQDFHDRYFIAKDKSRVEARKTLNRLLEGNINTIERGHGYKFNIPKYTDNMEFNEEVKVSLAKAGKTISRSFCNANQREVASRTGYTIDLIERTLGAGLNISKRTVLYTNKDLFGDQSKSDQAINDICALTNIRRGSLGIIAAEKGIVVGNIFLELTNGKSISCSIGVQIPHRLDQIKDVCVEIGSRNIEYILVVEKHTMLNYLLEMDYHTNNNCIILTGCGMPTLQTRDFLRFLKQRTGLPVFGLCDPDPEGISILATYARGSCNSAYDNFNISVPSICWVGLSSSDMIKLNLSETNYSRLSREDKTMLKNLWQDDLSDVWKRRIEEMISFDKKASFEAIHSLGFDYFATNLLPDMINKVREGYVQVQEKKEPQDTEASED

SEQ ID NO: 54260 - protein, 140 aa, Oryza sativa
MEALDDCKWRQIPAFGDWNIWDDMPVTQYFESGTFFFTAQAEKDEDLFKVPQFPANPYNYKKCVVRVKGEKENANANANAVRVRKGGRKQQYLNEQQKWKPKTAVDEDLYKISPKLICRVKKKKLLRNLLGGCLGVNCIA

SEQ ID NO: 54261 - protein, 782 aa, Oryza sativa
MEAAVLPRPADISPELRRFLDSRFRSQADLAAAADVEAEIRGRYAELEASVSDLSVRLAAAAAAYSSSCSAAGTALSNVRGCLAALNASTSEPGVTEAVEVGSEEMLFEQLSSLAKEVARVELVRDYAETALKLDSFVGDVEDAVSSSVTGKLKSRAESSLKTYHVPIGYLKTIEDILSSVTKTRPQWTRLVSAVDHRVDRSLALLRPQAIVDHRALLASLGWPPSLSGTNFSSINSGKPSEIVNPLFSMKGDLKSKYSESFLSLCSLQELQKRRKARQLEGHIVNNQLRQPLWVIEELVNPIAAAAQRHFSKWVEKPEFVFALAYKITRDFVDSMDEILQPLVDKANLVGYSCREEWISGMVITLSTYLVKEIFPKHIELLQEISSADASSKQSQARVSWLNLIDLMISFDKQTQALISSSGLLLSVKDDDNWQRISVLSVFCDRPDWLEIWAEIERQDTHDKLRLSMENEKNWNTRFQGTVLEYGSDDYKSPAITGVIQKGLSLLIDRARPIPNIALRAEFIKISTSPLLSEFLGWMLQRCQEAEGLTALADDNALLKVSQSINAARYLESTLTEWCNDVFFLEMENIDGRSECIFQVEINQLKDFRVQWTEKISTVILRDFDARSRDYLKNKRQWQEKSEGLTLSRAFVECLDYMQGRIAKLEDGLNVLDFVTVWRTVASGVDQLLFSGIFSGSTKFSNGGVERLHGDLSILFAAFSAWCMRPEGFFPRLSEGLKLLDIDEKQLRDGACTDNNRLREYGIRRLTAAEVEKIIKNRIYES

SEQ ID NO: 54262 - protein, 173 aa, Oryza sativa
MEFHGNLSLADLWYDWPGGRNLHVIRYQLAADEPFYDNEWNNGTSFFYTPARRACRSAAVGVGILPPNWLVPGSVYLGRHPADGFDCHVWAKADFITYYEDTLTKRPVKWVFYTGRTSHVMSFEEGAVLEDAEWQAPEYCFGKGDETETSNDNALISEPVAGHDKGFFPRREF

SEQ ID NO: 54263 - protein, 586 aa, Oryza sativa
MAALGRASSSAPVLAAAAAVLLSLCLAALSEEQEQLENLRFVRHAQDAPLVSSYNYIVIGGGTAGCPLAATLSEHSRVLLLERGGLPYANMSSEQHFTDALADTSPASPAQRFISEDGVVNARARVLGGGSCLNAGFYTRASNEYVRASGWDARLVNSSYRWVERSLVFRPDVPPWQAALRDALLEVGVTPDNGFTFDHVTGTKIGGTIFDNSGQRHTAADFLRHARPRGLTVLLYATVSRILFKSQDGVPYPVAYGVVFSDPLGVQHRVYLRDGDKNEVIVSAGTLGSPQLLMLSGVGPQAHLEAHGIEVIVDQPMVGQGVADNPMNSVFIPSPVPVELSLVQVVGITRSGSFIEGVSGSEFGMPVSDGALRWARSFGMLSPQTGQLGTLPPKQRTPEALQRAAEAMMRLDRRAFRGGFILEKILGPVSSGHVELRTTDPRANPSVTFNYFREAEDLERCVHGIETIERVIQSRAFSNFTYANASVESIFTDSANFPVNLLPRHVNDSRSPEQYCMDTVMTIWHYHGGCHVGAVVDDDYRVFGVQGLRVIDSSTFKYSPGTNPQATVMMLGRYMGVKIQSERWKK

SEQ ID NO: 54264 - protein, 210 aa, Oryza sativa
MGCASSKQFKRPPGYEEPAVLAAQTTFTVNEVEALRELYNKMSYSIIKDGLIHKEEFQLALFRNSRKANLFADRVFDLFDLKRNGVIEFGEFVRSLSVFHPKAPKSEKTAFAFKLYDLRGTGYIEKEELREMVLALLDESDLHLSECAVEAIVDNTFSQADSNGDGRIDPEEWEEFVKANPASLRNMSLPYLQDITMAFPSFVMHSEAHD

SEQ ID NO: 54265 - protein, 595 aa, Oryza sativa
MHPVIAETGYAGTANTDGFLFSDSALHNVYPEDQFSSIKQLHPWIPSTTGRSSWLEEKIPVIHQRTSAAASSEIGSSVLHKPSLFPSIIDCFDKEPVPIHQSDGRYSYDSHLSHLTSCSTSLNYGLSMPSVAASPVVCGMKRIDPSPSDPVLKGRFLQYANPCRFNIGHFDSVQDEQKDHAGFQTAYRHCSDWNRCTNDTGIVGNYLANSSGETCNVGENSITGRFSQEILCSEVPMSRVQEPLSHHHSLVQEDLNAFCENITYRCNYHAELIKSMYNLSVALISSCNGDYELDESYQELIQSAIQNLSSLSPKRSKNLSIEENKSGNDKDAHVLAYKNLWIEAEASMCKLKYELQLARMELALKYHSQQSGAPPTIPLDVQDSSLSKSKSLLCDEVLDDPSKQQNHVKENTICSATLLPEEGNTGDGQSPKVNRSIANEVEAGVFTQLRVLRSRGDSICSFGEGSDEEQQETSNNKKTNGFDNTAAVSMDTLKSGDDSMNSVVVEPIKERVESSKTDVDTAAPFYSFVKRLSGSSSSSDVDFDKFLSSIKKQTDVTVMARHKDFVCDKGNIRSLDDPLINAKQQVIRSSSKMML

SEQ ID NO: 54266 - protein, 447 aa, Oryza sativa
MALLQFGGTLAPKLGEKPQLLPRSPALTRVIYADPRFLVSKSGSGGRLKHLVSPTASLQSRTSSRLFNHAPSPRFRHRRSSRFIVRADADFYSTLGVSRNASKSEIKSAYRKLARSYHPDVNKDPGAEQKFKDISNAYEVLSDDEKRSIYDKYGEAGLKGAGMGTGDYSNPFDLFESLFEGFGGMGGMGGRAARNRPMQGDDEAYNLVLNFKEAVFGVEKEIEITRLEGCNTCDGTGAKPGTKPTTCKTCGGQGQVVSSTRTPLGIFQQVSTCNTCGGTGEFSTPCNTCGGDGRVRKTKRISLKVPAGVDSGSRLRVRSEGNAGRRGGPPGDLYVFIDVLSDPVLKRDGTNILYTCKVSYIDAILGTTVKVPTVDGMVDLKIPSGTQPGTTLVMSKKGVPLLGKSNARGDQLVRVQVEIPKRLSSDERKLIEELANLNKAQTANSRR

SEQ ID NO: 54267 - protein, 491 aa, Oryza sativa
MSCFLCFGSAQEGEAKKPGADSKDARKDGSADRGVSRVGSDKSRSHGGLDSKKDVVIQRDGNNQNIAAQTFTFRELAAATKNFRQDCLLGEGGFGRVYKGRLETGQAVAVKQLDRNGLQGNREFLVEVLMLSLLHHTNLVNLIGYCADGDQRLLVYEFMPLGSLEDHLHDLPPDKEPLDWNTRMKIAAGAAKGLEYLHDKASPPVIYRDFKSSNILLGEGFHPKLSDFGLAKLGPVGDKTHVSTRVMGTYGYCAPEYAMTGQLTVKSDVYSFGVVFLELITGRKAIDNTKPQGEQNLVAWARPLFKDRRKFPKMADPMLQGRFPMRGLYQALAVAAMCLQEQATTRPHIGDVVTALSYLASQTYDPNAPVQHSRSNSSTPRARNLAGWNEDRRSVRSPNHHSPDLRREAARSSRAEVSRTSSTGDSGRRSGLDDLDMTGSQMGSPAQTGRKRETPRTADRQRAIAEAKTWGENSRERKHPNGHGSFDSTNE

SEQ ID NO: 54268 - protein, 284 aa, Oryza sativa
MAIRGPEASSFFPLTLVFSVGFFCARFFLDRLVYKPLAAYCFSSKASKLMNDEVRQAKIVKFSESIWKLTYYGSVQAWVLLIIKQEPWSLDTMQYFEGWPNQYMTSSLMLFYMCQCGFYIYSIFALVAWETRRKDFAVMMSHHVVTSILIGYAYLTGFFRIGTIILALHDASDVFLETAKLCKYTEKELGASLFFGLFALSWLLLRLIYFPFWIIKTSSYQSIISLRKLEKFPTTLYYIFNTMLLTLLVFHIYWWKLICLMIMKQLNNKGQVGEDVRSDSEDEE

SEQ ID NO: 54269 - protein, 420 aa, Oryza sativa
MSLTEVRIGEEVWLTCLSHALTTETEEVMGLLFGDIKHSSRGGVTALIWGASPQMRCERKKDRVEVNPELLAAATAQAESLSATIGEKTRVIGWYHSHPHITVLPSHVDVRTQAMFQLMEPGFVGLIFSCFSEDAQKVGKIQVIAFQSLGGNQQSVVPVNDPVINLESSWSSLDDTSHPALIEGIEQDTGDSKSSRNSKVWAKSSDVDFYPHFDANHSAKHQSKENAIVAYDPNNAPETPVDLDESDMTPSIQEALHRSNMDISGAEYVRKEVPLYVFPTRHLLKLDTTLTSYCDMQHVVFEEEKSAYNQAMHQNIRDGKIHPLTSIHHASTYNSSLCKLMEYCLSPAITVLQDRLKENELRLSMLMEEAKQLEAENQSMRNDSPRRLMYHGTSGTSSLMAQDKQMSPRSPSGTGRRKAS

SEQ ID NO: 54270 - protein, 44 aa, Oryza sativa; identical to SEQ ID NO: 39850

SEQ ID NO: 54271 - protein, 115 aa, Oryza sativa
MAKRLRESIFHDLLKKNMNQMYRYQVHQSQCLFREDWVNADALFKLFIEGRCSTPLLNTQIWNMLHFPVHFSMDPICFEVLMQIEEPEFLQGEKIFNAHRDSLQALAVNRCINLQ

SEQ ID NO: 54272 - protein, 58 aa, Oryza sativa
MRSNNSRNVLSKRKRGMNGIRSRIGSWLHPNMCAWILEYQPCMSKPKTLWALISLGNR

SEQ ID NO: 54273 - protein, 519 aa, Oryza sativa
METSAAAAPNGGAAAAEQQQRRRLPDFQQSVRLKYVKLGYHYLISHGMYLLLSPLMALVAVQLSTVSPGDIADLWEQLRFNLLSVVACSTLLVFLSTLYFLTRPRPVYLLDFACYKPDPQRKCTRETFMRCSSLTGSFTDANLDFQRKILERSGLGEDTYLPPAVLRVPPNPCMDEARKEARTVMFGAIDQLLEKTGVKPKDIGVVVVNCSLFNPTPSLSAMVVNHYKLRGNVISYNLGGMGCSAGLLSVDLAKDLLQVHPNSYALVVSMENITLNWYFGNNRSMLVSNCLFRMGGAAILLSNRRSDRRRSKYELVHTVRTHKGANDKCFGCVTQEEDEIGKIGVSLSKDLMAVAGDALKTNITTLGPLVLPLSEQLLFMATLVAKKVLKMKIKPYIPDFKLAFEHFCIHAGGRAVLDELEKNLELTDWHMEPSRMTLYRFGKTSSSSLWYELAYTEAKGRIRKRDRIWQIAFGSGFKCNSAVWKALQTVNPAKEKNPWMDEIDNFPVEVPKISKVGNA

SEQ ID NO: 54274 - protein, 199 aa, Oryza sativa; identical to SEQ ID NO: 30510

SEQ ID NO: 54275 - protein, 175 aa, Oryza sativa
MDPSAPSGSSADASASSSSSAVEDLAPGMAAMSLQDRFELLRGIGEECIQEDELMNLLQKKPVPICYDGFEPSGRMHIAQGIVKTINVNKMVRAGCKVKIWIADWFAQLNNKMGGDLKKIQTVGRYMIEIWRAAGMNLDGVEFLWSSEEINNRANEYWPLVMDIACKNNVKRIMR

SEQ ID NO: 54276 - protein, 538 aa, Oryza sativa; identical to SEQ ID NO: 35316

SEQ ID NO: 54277 - protein, 113 aa, Oryza sativa
MFAVRRPIRRDRRGGSGGVGALGAEGGGPRLGGGEAAAAVGTSRRCLGLSRFYTLERRRRRSKLFFFFIPFRDMEGFFSEKKFPEGWRRNFANQRILRLASSGTDIGRPIFIG

SEQ ID NO: 54278 - protein, 500 aa, Oryza sativa
MATEAAATARCLLLPLLSPLQSPHKQQQLIFAALLLLFFFSSLQSLHCYAAAGYNEQQEADRVAFLPGQPSSPKVSQFSGYITVNRQNGRALFYWFFEAQALPSQKPLLLWLNGGPGCSSVGYGAASELGPLRVSRNGAGLEFNKFAWNKETNLLFLESPVGVGFSYTNTSSDLTKLNDGFVAEDAYNFLVNWLDRFPQYKDHEFYISGESYAGHYVPQLADLVYERNKDKKANRYIKLKGFIVGNPLTDDQYDSKGLVEYAWSHAVVSDGIYERVKKVCNFKISNWTNDCNEAMSSIFRQYQEIDIYNIYAPKCNLAQTSRVAAFDHALEASDQEQFSRRIRMFSGYDACYSSYAEKYFNKPDVQKAFHANANGMLPGKWKVCSDSILRSYNFSVLSVLPIYSKLIKAGLRIWLYSGDADGRVPVIGSRYCVEALGLHIKRDWQPWYLNRQVAGRFVEYDGMTMVTIRGAGHLVPLNKPEEGLTLIDTFLLGKQLLTHR

SEQ ID NO: 54279 - protein, 846 aa, Oryza sativa
MSGQRIPEGYILMQNKAAAKKNLTPLEGSSASQKIYDEYCPVLLNQFKSREFNEFETFDAALDEFYSKIESQRVNQQQKSKEDSAAQRLNKIKLDQENRVHTLRKEVDHSIKMAELIEYNLEDVDAAIVAVRVSLANGMSWDALARMIKEEKKAGNPVAGLIDKLSFERNCITLLLSNNLDDMDEEEKTAPVEKVEVDLSLSAHANARRWYELKKKQESKQEKTVTAHEKAFKAAEKKTRLQLAQEKTVAAITHMRKVHWFEKFNWFISSENYLIISGRDAQQNELIVKRYMSKGDLYVHAELHGASSTIIKNHKPDNPIPPLTLNQAGSFTVCHSKAWDSKIVTSAWWVYPYQVSKTAPTGEYLTVGSFMIRGKKNFLPPHPLVMGFGILFRLDESSLASHLNERRVRGEDEEALPDVESQKLESNAELDGELDSDSETGKEKHDDESSLDNINVKKIDNPIPSNAPYVKDNADSSEQLSEIRTVVNSTTSTSKGQTSDRTVSSQLEDLLDKNLGLGPTKVLGRSSLLSSNSASVADDIDDLDTKKTSVRDKPYISKADRRKLKKGQNVGDSTSDSPNGEAAKKPVNSQQEKGKTIEKPANPKVSRGQKGKLKKIKEKYGEQDEEEREIRMALLASSGRASQKDKPSEDVDGATAAQSKPSTGEDDRSKICYKCKKSGHLSRDCPESTSEVDPADVNVGRAKDGMDRSSAPAGSSVTMDEDDIHELGDEEKEKLIDLDYLTGNPLPSDILLYAVPVCAPYNALQAYKYRVKITPGTAKKGKAAKTAMSLFLHTADATNREKELMKACTDPELVAAIVGNAKITAPGLTQLKQKQKQKGKKSAKEN

SEQ ID NO: 54280 - protein, 451 aa, Oryza sativa
MSSPDEDPPTEHERWRDLDMLLSRPGNLVHADFNPSPGLRDSLGSLVEVLVVGAGGLGCELLKGLALSGFKNIHVIDMDTIDVSNLNRQFLFRVQDVGKSKAEVAAKRVMERVSGVNIVPHFCRIEDKEIEFYSQFSIIVLGLDSIEARSYINSVACGFLEYDSDDKPIPGTLKPMVDGGTEGFKGHARVIIPGTTPCFECNIWLFPPQVKFPLCTLAETPRTAAHCIEYAHLIKWNEVHPGKPFDADDAEHMQWIYSEALKRAELFGISGVTYSFTQGVVKNIIPAIASTNAIVSAACALEALKLISGCSKTVSNYLTYNGLDGTHINVSEFAREKDCLVCGPGTLIELGTSTTLSEFIKMLEEHPKLLMSRASVTHEGDNLYMQAPEVLEQMTRPNLGVPMFELLKGAARTTVHVTGMAENNGKKVSSLRKLRVTFKGVEESSKMDESS

SEQ ID NO: 54281 - protein, 100 aa, Oryza sativa
MSTTAQRREASELRPSLSSVPSPAAATNEKQKCNIKEGSVERTRLTRSESGTNTEERHHHCRRQGRRRHPPLLPRSLSPAVVAVVCAVAIRCHHHRGRRV

SEQ ID NO: 54282 - protein, 226 aa, Oryza sativa
MAATTTIPARPLLAAVLAALLLSAASAADSKNNPADQLVALINSNRTASKASTLDDNQGLGCIALQYIKAYEGQCNQVGESKKPPETSFAETFAPNCGVQAATLTKITGRLLACQSNYATPDQAFNFLVNDAKSIQVLHSKNHTEVGAAVSGTSGGGPYFWCVLFSSGKPTTSFKVDGGVPKSVRPGCFSGNNDDCMGANAAVSIGAGTWRLVAALLFSAACVFAL

SEQ ID NO: 54283 - protein, 131 aa, Oryza sativa
MHPPTRRPGPSDPVTPASSSAEGRPTVTLSTLLLLRPAPLQRRPRGSREATGGCSLLFSLSLSILFLCRSAEACNNNNGCVGEQSRRPGITRSGRTAARFGEGASRSVALRPIVSVDGGRSFTVIQGRWVY

SEQ ID NO: 54284 - protein, 463 aa, Oryza sativa
MEHVIGGKFKLGRKIGSGSFGELYLGVNIQSSEEVAIKLESVKSRHPQLHYESKLYMLLQGGTGIPHLKWFGVEGEYNVMVIDLLGPSLEDLFNYCNRKFSLKTVLMLADQMINRVEYMHTRGFLHRDIKPDNFLMGLGRKASQVYVIDYGLAKKYRDLQTHKHIPYRENKNLTGTARYASVNTHLGVEQSRRDDLESLGYVLMYFLRGSLPWQGLKAGTKKQKYDKISEKKMLTPVEVLCKSYPTEFISYFHYCRSLRFEDKPDYSYLKRLFRDLFIREGYQLDYIFDWTKQGSESNRLRSSGRTSGLVGPSAERTERAAARQDVPDRFSGTVDPFARRTGSGSGHYGEHTKHRNILDSLLAPKTAVDLDKRRPTSSSRNGSTSRKALLSSSRPSSGDPIDPNRSNLIPTSSGSSRPSTMQRLHQSTGLETRSSLTKTARNVHDDPTLRTFERLSISADRRK

SEQ ID NO: 54285 - protein, 468 aa, Oryza sativa
MGLLMRPVALLIYCTTASLFFLTSSSSAAIAGGTPDGSEEWGYVQVRPKAHMFWWLYRSPQRVNNKGSTPWPTVLWLQGGPGASGVGYGNFMEIGPLDTNLKPRPSTWLSKADLLFVDNPVGTGFSYVEGGDRTLLARTDAEAATDLTTLLSQLYRSNNTRLQGSPLYIVAESYGGKFAVTTALAALKAIHAGRLAASLAGVALGNSWISPEDSVLSWGPLLYQVSRLDENGLYLSDSLAQQIKAQVKAAQFLEAENTWQSLESIILEQANFIDFYNFLKDDSSSDANLEQQQRQRLLASLGQSRRRYSSYLSSKVTTEGGFEGIMNTVIRDKLRIIPKNVTWSEQSDDVFEALAGDFMKPRILEVDELLNLGLNVTIYSGQLDLICATKGTLDWIQKLKWDGLKNFTNSRRVPLYCSGGEAAGTQAFLKSYKNLKFYWILGAGHMVPIDNPCPALKMLGDITQSPAQ

SEQ ID NO: 54286 - protein, 316 aa, Oryza sativa
MDSLGVLLVAPMNAYLEQELDRRCRLFRLWESPADRRDDYLRAHASSIRAVVPYALQGVDAAMIDALPSLEIVSSFSVGIDRVDLDACLRRGVRVTNTPDVLTDDVADLAVGLAIAALRKIPQADRYVRAGKWKSKGDFTLTTRFSGKRVGILGLGRIGLAVAKRAEAFDCPISYHSRSEKPFPKYKFYPNVVDLAANCDVLVVACSLNPETRHIVNRKVIDALGPEGVLINIARGAHVDEPELISALLEKRLGGAGLDVFEDEPFAPEQLFELDNVVLVPHVGSDTEETCWAMADLVLQNLEAHALNQPLLTPVI

SEQ ID NO: 54287 - protein, 171 aa, Oryza sativa; identical to SEQ ID NO: 42214

SEQ ID NO: 54288 - protein, 254 aa, Oryza sativa
MQNKYPYYRFIAHIMIFNSEIIRHCSEKSMAWGGLFLSFSRPSQDQQKSCLSAAGGFNYDAPLHGASRPKSVAKLTAGDTEASDKALVERGFFVNRSRVLVGSGTTTFNHAKSALLSWKHLALGWANVEPDTPVKAGTRFCICYKELIPWVMLPLQIAYVTDGNGGNSSGHGKGCVFAYGSGTLQGHLLAGEERFSVQLDEDDQVWYEVMSFSKPAHILSSLCYPYVQLRQKHFAHQSGQALLRHVASRSRDTR

SEQ ID NO: 54289 - protein, 279 aa, Oryza sativa
MDKASCGLGFGDSINSLDTSRHWSTVQHTSGLKATTIDYSTYSSFSIASSKTLKRKRSAMAGPEGTGNPLLTLGLGHSPSSSDNSKVSSATAYAMSPSSLKEADEESSADLGLNFELCLGNDMVHCQKKSPVGAENSPLTNSHKLDLQLSLSTGSPESAVTNTNMVSPIIHGGLEIPVTNCSPAIIGEGSVPCTWVFEKSVISSSYASEATYTFPFSKVPKTGDAAMSSPVISSTLVTSMKSPVARTSGSINPQQRNSITKTVSFQDVLKEPEGHRGIA

SEQ ID NO: 54290 - protein, 541 aa, Oryza sativa; identical to SEQ ID NO: 45775

SEQ ID NO: 54291 - protein, 301 aa, Oryza sativa
MSSGGVGGGSLGAGLLYHKFVSFALEETRLRTTLTPHPSQEKFKSIKPNDDNTVFNALSFSAPKIRLLRSLTIEKKNSYQVLDFAAFSEPEYDLPIFCANVFTTHAQSIVVLDLNPLYDTTVHKDYKDKYYRSIMPLVHKYNELLPWGGKITSESLKFFSPIVIWTIFESTEHNHHVLHSAFVDYYKVWLELMDQAIKENNKATIARNQEEQHKYLTWRAEKDPGYPLLKKLIGESRAEDLVMEFLFEGVNTLGTKSFLDYFPEYARDDGSVNKKRSMIGKSFETRPWDANGEFIGDAEAQ

SEQ ID NO: 54292 - protein, 336 aa, Oryza sativa
MGSEEEPSQMRRALVDALAGAISGGISRTVTSPLDVIKIRFQVQLEPTTSWGVLRRDVYGPSKYSGLLQASKDILREEGLPGFWRGNVPALLMYMPYTAIQFTVLHKLKTFASGSSKTEDHLHLSPYLSYVSGAIAGCAATVGSYPFDLLRTILASQGEPKVYPDMRSAFLDIMKTRGFRGLYAGLTPTLVEIIPYAGLQFGSYDTFKRSMMTWNRYRYSHLNSGSEDDSVSSFQLFLCGFAAGTFSKAACHPLDVVKKRFQIEGLKRHPRYGARIESSTYKGMYHALKEIVAKEGFGGLYKGLFPSLVKSAPAGAVTFVAYEYISDWIGSKAGVE

SEQ ID NO: 54293 - protein, 149 aa, Oryza sativa; identical to SEQ ID NO: 28724

SEQ ID NO: 54294 - protein, 631 aa, Oryza sativa
MDNSFVDIPNQPPMNNPFVLMEPSAQSYMVNLGKSTPHMDCLGSAMANYGHGNQNIQCIDSITTRDDGCRLVLGLGPTPNFYSAECQPTGVDKLKEAPSLSGQGLTITDPGTLRLGLQMDVSQTIQPLQAPDGTVHSFTVVDEASASPSVRSIGGYMPSLLFAPRSGSSAVNETHEAETQDSLDLTHSDNDNTQHVQHHLQLSPEPSAMTDTSFGVSSDVVTATTTSEQRNHPRHPKKCRFKGCSKGARGASGLCIAHGGGQRCHKPGCHKGAESSTAYCKAHGGGRRCEELGCTKSAEGKTDYCIAHGGGRRCEHDGCPKAARGKSGRCIKHGGGKRCTVQGCIRSAEGKAGLCISHGGGRRCQFPDCSKGAQGSTLYCKGHGGGKRCIFDGCSKGAEGSTPLCKAHGGGKRCMFEGGGVCPKSVHGGTEYCVAHGGGKRCSVAGCTKSARGRTDCCVKHGGGKRCKVDNCSKSAQGSTDFCKAHGGGKRCTWGTGCEKFARGRSGLCAAHGTLAAKQQERDAANNGAGMIPPGLFSGIVTVAATSSMTNEYSSSGISTASDCDGTVRSQAMMIPPQVLVPRSMMPSSSSEPTVHGGREGGCAVPEGRVHGGGLLSLLGGSFRNADMDKL

SEQ ID NO: 54295 - protein, 851 aa, Oryza sativa
MAGASSYFSLRRLLLLLLPLVPLLGATTAAAAGANSSVTYDHRSLIISGRRRLLISTSIHYPRSVPEMWPKLVAEAEDGGADCVETYVFWNGHEPAQGQYYFEERFDLVRFAKIVKDAGLYMILRIGPFVAAEWTFGGVPVWLHYAPGTVFRTNNEPFKSHMKRFTTYIVDMMKKEQFFASQGGHIILAQVENEYGDMEQAYGAGAKPYAMWAASMALAQNTGVPWIMCQQYDAPDPVINTCNSFYCDQFKPNSPTKPKFWTENWPGWFQTFGESNPHRPPEDVAFSVARFFGKGGSLQNYYVYHGGTNFGRTTGGPFITTSYDYDAPIDEYGLRRLPKWAHLRDLHKSIKLGEHTLLYGNSSFVSLGPQQEADVYTDQSGGCVAFLSNVDSEKDKVVTFQSRSYDLPAWSVSILPDCKNVAFNTAKVRSQTLMMDMVPANLESSKVDGWSIFREKYGIWGNIDLVRNGFVDHINTTKDSTDYLWYTTSFDVDGSHLAGGNHVLHIESKGHAVQAFLNNELIGSAYGNGSKSNFSVEMPVNLRAGKNKLSLLSMTVGLQNGGPMYEWAGAGITSVKISGMENRIIDLSSNKWEYKIGLEGEYYSLFKADKGKDIRWMPQSEPPKNQPMTWYKVNVDVPQGDDPVGLDMQSMGKGLAWLNGNAIGRYWPRISPVSDRCTSSCDYRGTFSPNKCRRGCGQPTQRWYHVPRSWFHPSGNTLVIFEEKGGDPTKITFSRRTVASVCSFVSEHYPSIDLESWDRNTQNDGRDAAKVQLSCPKGKSISSVKFVSFGNPSGTCRSYQQGSCHHPNSISVVEKACLNMNGCTVSLSDEGFGEDLCPGVTKTLAIEADCS

SEQ ID NO: 54296 - protein, 250 aa, Oryza sativa; identical to SEQ ID NO: 28499

SEQ ID NO: 54297 - protein, 220 aa, Oryza sativa
MPGLTIGDTVPNLELDSTHGKIRIHDFVGDTYVILFSHPGDFTPVCTTELAAMAGYAKEFDKRGVKLLGISCDDVQSHKDWIKDIEAYKPGNRVTYPIMADPSREAIKQLNMVDPDEKDSNGGHLPSRALHIVGPDKKVKLSFLYPACVGRNMDEVVRAVDALQTAAKHAVATPVNWKPGERVVIPPGVSDDEAKEKFPQGFDTADLPSGKGYLRFTKVG

SEQ ID NO: 54298 - protein, 731 aa, Oryza sativa
MGLDNNFGELSGMFCGLSYDGYTDHGSQSDYFRFADPQPAIVPQMDAGPSSAASSTASRAAVSSGTDNPEDWEFISDESLNYISRMLMEEDIDEKVSMYQEESAALRAAAKPFYDILGHKFPPSPDRQLVAWPLDSPSESSTSSYPHSLASSVTSSNISGAVDSSQRRYVGHSEYRSLSGHSSQPPVGPSSDVRNAMETLEDPLISNGRIPEYLFESFPTWDFRRGVDEAQKFLPGSDKVVIDLEAGGVAKRQEAGKAISLNVSKAEVLKVKKNRQSEDLDVMEGRNSKQSAFCSDEPDWIEMFDVLLRQTEKKATDLRKMMRFEASKNSQVAQPKGPSGTRSRGRKPTKKDVVDLRTLLIHCAQAVAADDRRTANELLKQIRQHAKPNGDGSQRLAYCFADGLEARLAGTGSQLYHKLVAKRTTASDMLKAYHLYLAACPFKRLSHFLSNQTILSLTKNASKVHIIDFGIYFGFQWPCLIRRLFKREGGPPKLRITGIDVPQPGFRPTERIEETGQRLAEYAEKIGVPFEYQGIASKWETICVEDLNIKKDEVVIVNCLYRFRNLIDETVAIDSPRNRVLNTIRQVNPAIFIHGIVNGSYSVPFFITRFREALFHFSALFDMLETTVPRDDAQRALIERDLFGREALNVIACEGSDRVERPETYKQWQVRNLRAGFVQSPLNQDIVLKAKDKVKDIYHKDFVIDEDSEWLLQGWKGRIIYAISTWKPNNN

SEQ ID NO: 54299 - protein, 696 aa, Oryza sativa
MPSLPVAAAEPMAVDESASKKSKRKLKAAEVEVEASSRKKEKKEKKRKAKEPSPSSSSSSEEEERSSTSSDEPAPAAKKAKKEKTKEKVVVEEEEEDDDEGELTASGDEDPADPNALANFRISESLREKLKSKGIKALFPIQATTFDLVLDGHDLVGRARTGQGKTLAFVLPILESLVNGTHKASRRTDYGRPPTVLVLLPTRELAKQVHTDFAFYGATFGLSACCVYGGSDYRSQEMAIRKGVDSVVGTPGRVKDFVEKGTLNFRSLKFRVLDEADEMLNMGFVDDVELILGKVEDVTKVQTLLFSATIPEWVKKLSLRFLKSGKKTVDLVGDEKLKASASVRHLALPCNRAARAQVIPDIIRCYSRGGRTIIFTETKESASDLSGLIAGSRALHGDVAQAQREVILAGFRSGKFLVLVATNVAARGLDINDVQLIIQCEPPRDVEAYIHRSGRTGRAGNTGVAVMLFEPRYKFNVNRIERESGVKFEHISAPQPTDVAQSAGTEAAEAISSVSDSVIPVFREQAEQLLNSSGMSAVDLLAKALAKAVGYTDIKKRSLLSSMDNHTTLLLQTGRSVYAAGFVLSTLKRFMPEERLADVKGITITADGTGAVFDVPSAEVEDYIQGAQNAAMVTVEEVKQLPPLQEREQSGGSRGGGRFGNRRFSGGGGGRGGGGRGFGGGRGRGGGGGNRFNKRY

SEQ ID NO: 54300 - protein, 315 aa, Oryza sativa
MMKRFYSSIGQGVEALHRSLAVGEVGFMSAAFVQQAAALVRSVHAQLLEVVGRLHLPAGERWLDEYMDETSRLWDACLLVRAGASALHAYSAAAAHAIHHLYDHDDDYIHAARAINAPRRHAAGLLQDNRALLHDNILDPASLLLLDHRSPRDLNLNAFNGFRALLYALRNATSFLLAILLSATVSSCLPDHLISTCTPLPLPTAPGYASSMARLRHRVAQEMRALAAPAADGILMYEFRQARAAIDSLKADLDRVVATGTGYAHREDMAERAHLVKGCLAMLSSGAEAVIAELDDLFDDIVEGRKMLSDLCSHR

SEQ ID NO: 54301 - protein, 843 aa, Oryza sativa; identical to SEQ ID NO: 54063

SEQ ID NO: 54302 - protein, 22 aa, Oryza sativa
MMSSLTSAAVIPFQINRNSFSV

SEQ ID NO: 54303 - protein, 182 aa, Oryza sativa
MGEPSKELLDLPSEPKPPSLIESILVGRREQQQHKEGKRKAGPPTDPLPKSQVLGRVKDFLGEMAKANEKLHLDVKNKRPEEYDIEALTGNEKEYIEMDLLLGVADLHSEKAVEVAEATMNGFPPSGRSFACSSSDSEDDSDGSDEDSGDETNMSSKDADEPEAQASKGKKPNKRQKIVVLN

SEQ ID NO: 54304 - protein, 515 aa, Oryza sativa; identical to SEQ ID NO: 28717

SEQ ID NO: 54305 - protein, 106 aa, Oryza sativa; identical to SEQ ID NO: 29501

SEQ ID NO: 54306 - protein, 284 aa, Oryza sativa
MACRGFFECLLKLLNFVLTVAGLAMVGYGIYLLVEWMRISGGGGGAPPSPAPPAELLMFGRPMLTAVALGDGGSFFDKLPKAWFIYLFIGVGAIIFVISLFGCIGAATRNTCCLCCYAFLVILLILVEAGAAAFIFFDESWKDVIPVDKTENFDVMYDFLKENWEIARWVALGSVIFEVLLFLLALVVRAMNKPAEYDSDDEIIATSRSTSIRQPLIHSQNVPATGVPVATLEQRASRNDAWSQRMREKYGLDTSQFTYNPSDPSRYQQNGAPPAEERNRCVIL

SEQ ID NO: 54307 - protein, 527 aa, Oryza sativa
MGPRPPGGSSDKKSCQNVTPDKDSSMNFCHQQYPQHLFSQPPYAMNFPFPPFPHYPPYTQNLQYAVPPQYAPYTLPPPAGAMPSTFLPAPVIPSKAPSDQGTPRSITGPGEQGTDNAEPEKATKRLYWTEKEDIRLISAWLIYYKTDRYWEKVVAEYNSTIPATRRRELQHVKGHWHKIFRKVAHFHDCWCRVKAKYPSGHSEGMQLMDKTWLMYNEEARVMYLEEAEHNFAFDHCWKAVWNQPKWKAYMSCLFTKRTMQSDSWEYMSSSEDSEEMPGKEIGEEVCMTSKEAKVKRSTSSSEMQEDMLIKNPEELTEVEPSISNEKHLLASLKQQDACTKDTGISKKQSELLTADTSWPTGFRLVDTSELNEHQQGLAVRDDMLEKESRPQGFDAQDNERATRENIPRKETQPRICKAPKFSRKRKGKASSSSCEVQEDIKHAMHLQTMLNNDRVKMSEVQLRLSKEQLELARIKQEEAREKKETTLYKKYTELLLADTSRFDEFQKAEYEKALRHIGGMLFSKDGN

SEQ ID NO: 54308 - protein, 345 aa, Oryza sativa
MPSAGAGAAFLLRPISATTHPLISLSCTGAGDSANHKSHLLFRLHHSCRRLPVPRLSLTPAPTGSNNSPPSPPPASPEPPPPPFSRWSPPRAIWRGLSALLLAGQVFHRVLTGRVHRRNLLAQLRRVGPGSAGVSLLTAAFVGMAFTIQFVREFTRLGLHRSVGGVLALALSRELSPVVTAVVAAGRVGSAFAAELGTMQVSEQTDTLRVLGAQPVDYLVVPRVVACVLALPVLTLMSFALGLASSAFLADSIFGVSTSIILESARRALRPWDLISSLLKSQVFGAIIAVVSCAWGVTTHGGAKGVGESTTSAVVVSLVGIFVADFALSCLFFQGAGDSLKYAMG

SEQ ID NO: 54309 - protein, 113 aa, Oryza sativa
MDRPQNQQYIMQPRGDKFSNGQKCVVDRIGHTFFHCSMERPISAWITSITAPATTQPLGHFILSYHKEDSLHVCLLSFVWLYMDSIDMLFRGLDHFILIRHVCTSMWAPVCCI

SEQ ID NO: 54310 - protein, 577 aa, Oryza sativa
MAESVVFGILCKIGSILGSHLTQALVSHLGKEVSVLIEVESIVKQIRSEFRLMQSFLQDGQEKESSSRQAETFLQEVQQIAFEVEDILDEFVYYFGRKETPSVELLKNFFRKSESVMPLRRIAAELKEVQNRLQNIRNLKLQYNIDLSEESASSIRYEDSKGHTLHHIMHNKKLVGFVNERQKLQELLMANERSCSIISIWGMGGSGKTTLVKTVSESKASKNRFDCQIWVTVSQTYDITEIMRKIIQCALKDTCSADLGSMSSEGVVLMLQETLQGRTYMMVLDDVWDTNVWFSLEGFLDESSIRSKVVITTRINDVASLAEDKRRLQLRGLDEAESWDLFCMWAFRHGEDQTCPPAMDRVARQIVGRCEGLPLAITAVGNLLSFKRLDLVEWEKFYNQLNWELHNRLDNQGLSMVTRLLGLSYKHLPVHLKNCFLLCSIFPEDYMIRGKRLCKLLVVEGLVEPRKNMTLEEIAMEYIEKLVDRCLLQVARRNKLGRVWELQMHDIIRELAISISEKEGFCMIHNKAQRSVVECEPRRLSIHENSVRVQLSINASRVRSFYQFDIDCSSVSKVQWV

SEQ ID NO: 54311 - protein, 248 aa, Oryza sativa; identical to SEQ ID NO: 28818

SEQ ID NO: 54312 - protein, 466 aa, Oryza sativa
MSNRSKFWRLAALVPEVQCPDQPISPRQKFKYTAIVLFIFVTASQVLLYGIQHQPRTIEPDPLHWLHLILASSRSTLLSHGIVAILVPEVLVKIWVYLKIITLDTSAPETGVLMNRAQRLLGILVAILGAVNFYVRSKHFTVNTVLIMLQILCSDIIVIYLDDVLRKGYGLLSGISLFTATNICVNILWKAFSPMSVMYPEQSPEFEGAVIAWVHLLMTRTDKLSAMSKAFYRQNLPNIINFLATCLFVPLAIFFQGFYIVLPVRTRRNFQAYCHIKLSHFLYGPVVLHRLLLPLPYVASKVLYKKYSGNTLVNLLGKWDGLNHFGQSIPVGGIVYYLRTPPILADLHRDPFHAFIYVAFVLISCVFISMGLMVCASSKGVFNGFVVLNMQEERRLRLAQPDSIHANEIRRHVMRAACVGGFCAGVLIIFADLIGVFCSGTGIMLAVTASYPYVDGRASEVGSFGF

SEQ ID NO: 54313 - protein, 357 aa, Oryza sativa
MSRTLVQPVGQKRLTNVAVVRLRKHGQRFEIACFPNKVLSWRTRVEKDIDEVLQSHTVYSNVSKGVLAKSKDLLKAFSTDDHTAICLEILDKGELQVSGKEREAQLSSQFHEIATIVMDKTINPETRRPYTITMIERLMHDVHFAVDPNLTSKEQALKVIKKLTEHFPIKRAPLRVRFTAPKSKFASLTEKLEEWNTNVISKDESGSQPSVVCEIEPSILRSCEERLKDVQGRVEVLSVSAHAEGGSSVDQYENTEESQSVPAVEIDPVARIGEAMQKQSISSEPENPGQGQGKQQRRCKECDVLVEDKLYREHCKSGWHKHNYTRHKNGLPPLSQEECLVEMELADSKRDLKDYDF

SEQ ID NO: 54314 - protein, 346 aa, Oryza sativa
MVGGELVLAALVILLALLLTLVLSHFLPLLLNPKAPKGSFGWPLLGETLRFLSPHASNTLGSFLEDHCSRYGRVFKSHLFCTPTIVSCDQELNHFILQNEERLFQCSYPRPIHGILGKSSMLVVLGEDHKRLRNLALALVTSTKLKPSYLGDIEKIALHIVGSWHGKSKDKGMVNVIAFCEEARKFAFSVIVKQVLGLSPEEPVTAMILEDFLAFMKGLISFPLYIPGTPYAKAVQARARISSTVKGIIEERRNAGSSNKGDFLDVLLSSNKLSDEEKVSFVLDSLLGGYETTSLLISMVVYFLGQSAQDLELVKREHEGIRSKKEKDEFLSSEDYKKMEYTQHVR

SEQ ID NO: 54315 - protein, 274 aa, Oryza sativa
MAAGARALVPSPFIVVVFLLLAAAARDASALTRHDFPEGFVFGAGTSAFQVEGAAAEDGRKPSIWDTFTHQGYSPGGAIADVSADQYHHYKEDVKLMYDMGLDAYRFSIAWPRLIPDGRGEINPKGLEYYNNLIDELIMHGIQPHVTIYHFDLPQALQDEYGGILSPRFIEDYTAYAEVCFKNFGDRVKHWVTVNEPNIEPIGGYDAGVQPPRRCSYPFGTNCTGGDSSTEPYIVAHHLLLAHASAVSIYRQKYQLATGNSRRSDRDHSAGLVV

SEQ ID NO: 54316 - protein, 309 aa, Oryza sativa
MDVHPPNAAASSLEELFPHQPATESDRSGIEWLSVYVEDCLSTSASCTNPVSAELPPITMASQGAAKPKLPPRSSTNARKKKRSLASVISDTDDQHCITLFVEPPLLLLDHKDWLAESELILPKKDKDEELVQEQEQEEEENYKMSAGMQFQQEQLVITCSYCLSSQSPQWWDGPSGPTCDACRLRIEARNGHTTSSKKRYGQEIDKEQDIGKRRDKKKIKKAVYVNDELLSEEPMKRCTHCLSYKTPQWRTGPLGPKTLCNACGVRFKSGRLLPEYRPANSPTFVSDIHSNSHKKVMQLRNSVPHPRK

SEQ ID NO: 54317 - protein, 321 aa, Oryza sativa
MTSLPQSMISVNPSTQHVAPMNNLLSRATVHQHTQSYALTSDPVAVAVHHQPAVNKLAHEVQSISHPAVSHSSVAESHASYTSYTWQSSVATIAATGRNATPDRWAAPARTTNSFNAAPSNSNHVTYPNQNAYSNHSTQATTYNSYGSAPVSSHSLHPGQGLDRNGYTHAAEYQTTMARDALWRNSRSPELGAGAVYGSSSQGYVPEPSRQWNYGQQSYNPEPYSRQWSSGQQSYNTVTAEPSRQWSSGQQSYSNPAEPSRQWSSSAHAQPSYNPEPSRPWNSGHQSQNPEASRQWSHHHGKQERYNPTDGRNSYDQHWRR

SEQ ID NO: 54318 - protein, 586 aa, Oryza sativa
MAAAENYSRTAPLNSRTYQQDKYSAHVPAQDNVKSSQMDGLSDVPSAPPIHAYDQEISQVSQNVDANVCDGSTVKKEEYNDDGLEPNLPEKSERSTLNPGHSSKPSSSIPLRVPTFHASLQGPWYSVLAYDACVRLCLHAWARGCMEAPVFLENECTLLRNTFCLQNVLLQSEEELMAKRTSELVSDGVASKPKKTIGKMKVQVRKVRMSVDVPSGCNFSSLPMVKLNSVRYRLSNVQSTLSSGWESVRRIQTLPQLPANSSFSKHSLAYMQASAQYIKQVSGVLKVGVTTLRNSSSYETPQETYSCQLRLKSTPEDDVVPMQPGSGETHVFFPDSLGDDLIIDVSDSKGKPCGRVVAQVATMAEESTDKLRWWSIYREPEHELVGRIQLYIHYTTAADENNTKYGSVAETVAYDIVLEVAMKAQHIQQRNLILHGSWKWLLTEFALYYGVSDAYTKLRYLSYIMDVATPTADWLNLVHDLLLPVLMKTQGTAALSHQENRILGEVEEQIEQTLAMVFENYKSLNESLPSGLVEDFRPPTGLAACALEPAIKLYSLLHDVLSPEAQLRLCGYFQGCCQETIKTIHA

SEQ ID NO: 54319 - protein, 1174 aa, Oryza sativa
MPPSPSLRRSPSKEISHRRGHSFGSTVPAKPKDDELALFNDMRKNEEDNFLLESPDNFDETISKLSYFPDLKLGVNIARREESRDFLNTDGDKNDYDWLLTPPETPLFRSLDDDEDKLAGPAPRGRAQTKPILISRSSTMENAQRSSRSSASPNRLSLSPRSSSSNTALTRTRSTNSSSRCSPPLSLQSSTPSRRSPTPPGNKTLTPPRRSPSPASRRMSATSSGPTLNGTRGASPVKTNRRSSSPKFQGWQSSDPGFSFDAPPNLRTSMSDRPLSRSRGGSPSSFSGLNMVSRGRRQSMSPTPSRRTISSHSTERDRFSSYSKASATSSGEDDLDSMQSVPIDYSSSPAVKKSLAVMKTRTIASSQKPSKSFSPSSAPKRSFDSAVWLMDHRKAPQSMFRPLLSSVPTTTFVAGKGNVVHRPTFSHISSVTTSSNASSEHGATFSPCVDIDHERHDLVGQWETNDSSRIHEEIFMFDKSDELNEGSNCHQHSLSTTCSGLENSSGRVNCVESTKEGLDMKSRRTADQISCGFASSSEVGDGEMATCTRCGKIFNVMYLSGDNYCEECDFGDGIFSAGSKIQTTEGLHQKDHKFTQSKVCIPSEDRRPIALDCVEDSSDVSLDHQLVSNEPPADYLQRYSTESVVHTNEEKMLGKHLMNLKENISPHDIGDSSMGNSNDISPHTCSVSDYQEAEAAHVTEYKLFRLQKGNQNHEMAQCLSESDCQHNGFISGMVASGSHELGSTGPPSLKVENAEGNGISVLLLEETRSKKWPIVEGRTLVTTNIHCLEPYYTADSVSLMKRSIGRDSSSAASSIDLGPSGQSDVRFERLRSGKKGDFEKSQISCQSIASVSDMSISGSSASHYPQSYVNGDGCHPIYSLETSALTAAVFTEEHDGSFKEALSSAIECWSVAQAIVNDDCEVEDEVTQNQDKERMARDDNLGVDMCSSYTEVPSDMPQSPAADVSFIEKTENDSQEVPAIADYSVATPEHPCDENNSDIPRILSETVAASDDESKLDDCGVSSVPEEGALVSARDETKDEGRRKQFQRCFTLEEATDTILFCSSIVHDLAYKAATVGLEREQEAEFAHAPRPTVTMVEKFIPREDGLLRGPQRRTTRRKVERKIPEGDGESITDTARTEVITKEPAPVRSSSEITTFDSLKPPKMESKCNCTIM

SEQ ID NO: 54320 - protein, 499 aa, Oryza sativa
MPLLLRGGSLFRLYGCGCGLPSANFSPSKLALIRLSLMMAETRATYSRRAASKNTDIKKDDEHVLEKEDVAESKLEIEQLRNDPDRLQSMTVKELREITRMMGIPVKGNKKDLVSALMDSLGKVGTSSVEKIGVSEVPSKRKGASVVVEQNIDSSEVISETPSKRSRAKNKGTAEESSGANVKQSKTSVQKKKLVVQGASVDHEEPWTVLVHKKPQPAWIPYNPKVMRSPSLSKDTKALKILSWNVNGLKALLKSRGFSIHQLAQREDFDILCLQETKMQEKDVEVIKEGLLEGYTHSFWTCSVSKLGYSGTAIISRVKPLSIKYGLGVPDHDTEGRVVTVEFNDFYLLTAYVPNSGDGLKRLTYRVTEWDPSLGNYMKDLEKSKPVILTGDLNCAHQEIDIHDPAGNRRSAGFTIEERESFETNFLSKGFVDTFRKQHPNVVGYSYWGYRHNARKTNKGWRLDYFLVSESIAERVHDSYIIPDISASDHSPLGLVLKL

SEQ ID NO: 54321 - protein, 507 aa, Oryza sativa
MGSTGDCGNGKAAAGGGGLVVPEIKFTKLFINGEFVDAASGKTFKTRDPRTGDVLAHIAEADKADVDLAVKAAREAFEHGKWPRMSGYERSRVMNKLADLVEQHADELAALDGADAGKLLTLGKIIDIPAAAQMMRYYAGAADKIHGESLRVAGKYQGYTLREPIGVVGVIIPWNFPTMMFFLKVSPALAAGCTIVVKPAEQTPLSALYYAHLAKLAGVPDGVINVVPGFGPTAGAALSSHMDVDSVAFTGSAEIGRAIMESAARSNLKNVSLELGGKSPMIVFDDADVDMAVSLSSLAVFFNKGEICVAGSRVYVQEGIYDEFVRKAVEAAKNWKVGDPFDAATNMGPQVDKVQFERVLKYIEIGKNEGATLLTGGKPTGDKGYYIEPTIFVDVKEEMTIAQEEIFGPVMSLMKFKTVEEAIEKANCTKYGLAAGIVTKNLNIANMVSRSVRAGTVWVNCYFAFDPDAPFGGYKMSGFGRDQGMVAMDKYLQVKTVITAVPDSPWY

SEQ ID NO: 54322 - protein, 524 aa, Oryza sativa
MDKTTTSDLVLDNDNIGSNAGSAQEPLTTNGKTSGVRNRYKQTVKRGRKGSQISPSKTYPLRSSHSNVRVLRSASKKKNETPIVPTNDNTAVQRVAKKRKRSKPLRPAPSRVLRSTSEKKNKAHNELLNDGAGVQPAEKKRKVGRPPKGGTPKDDYLMIRKRVRYVLNRMNYEQSLIQAYASEGWKGQSLEKIRPEKELERAKVEILRCKSRIREAFRNLDSLLSEGKLDESMFDSAGEISSEDIFCAACGSKDVTLKNDIILCDGICDRGFHQYCLNPPLLAEDIPQGDEGWLCPACDCKIDCIDVLNELQGVKLSIHDSWEKVFPEAASFLNGSKQIDASDLPSDDSADNDYDPTLAQGHKVDEEKSSGEDGGEGLDSDDSSSEDSESSEKEKSKTSQNGRTVDDLGLPSEDSEDGDFDPAGPDSDKEQNDESNSDQSDESDFTSDSDDFCAEIAKSCGQDEISGPSSSQIRTVDRTDGSGFDGEPNAENSNLAFMETELEQDMVLPISSKRQVERLDYKTV

SEQ ID NO: 54323 - protein, 607 aa, Oryza sativa
MDSDAEMPMSSDEEMLDDEDYYDYSDDMGEDDDGSGGGGGGDSDGEEEEEGDEELVGGDYEGREAEGSDEVVSRREQRYIVLTEKDINERQEEDIGKVSAVLSIRREEACVLLHHYKWNISKLSDEWFADEEKVRDIVGLLLNGIDLPNSRKLTCGICFEGYSSDVMSSADCDHFYCHECWEGYISAAISDGPGCLSLRCPDPSCGAMVLQNMINKLAKDDDKVRYARFILRAYVEDSKKTKWCPAPDCTCAVEFVSDGNYDVSCNCKFSFCWNCTEEAHRPVNCETVSRWILKNSAESENMNWILANSKPCPKCKRPIEKNQGCMHMTCTPPCKFEFCWLCLGSWAEHGERTGGFYACNRYESAKKEGVYDETEARRERAKNSLERYMHYYERWASNQTSRQKAQADLQKAEKEQLAKLTDVFGIPGTQLKFIIEAWSQIIECRRVLKWTYAYGYYLDDKVKSEFFEYLQGEAESGLERLHQCAEKDLQSFLTVRSDNTEPAPSIAEFGDFRVKLAGLTSVTRNYFENLVQALEAGLEDVHSTAQGTTSSNATNIPSKKAVTKGKTKKQLPRTSSDNSDEGWPCERCTFINPSSVDACSVCDKHRY

SEQ ID NO: 54324 - protein, 232 aa, Oryza sativa
MALSISTPPTSSSLLPASLQVGRWSSSAAMSARPVAFSLRRPVLAARVAAGGNAPSSSVDEVVTELDAVASFSEIVPDTVVFDDFEKFAPTAATVSSSLLLGIAGLPDTKFKSAIDTALADGECNTMEKPEDRMSCFLTKALANVGAEMAHLVPGRVSTEIDARLAYDTQGIIQRVHELLKLYSDHDVLSERLLFKIPATWQGIEASRLLESEGIQTHLTFVYRYVHMLCLI

SEQ ID NO: 54325 - protein, 528 aa, Oryza sativa
MWRRQHALLRRISLPKPPAATGIGCYYATEPEGRKPKTAPLQSRGMVDRFRLRAKGGDGGNGCISLRRSRSDRQGKPDGGNGGRGGDVILECSRSVWDFSGLQHHMKASRGANGVSKNQIGTRGSDKIAQVPVGTVIHLVEGEQPSLSVNKPTRALDPWDIPDAVEHSPFSSSRIGSKMMKGLDSSRSSQHISSKKNTAENDCERGNRNHRGKEPYYMTEFVRTEDYDGTSYPHQVGVDENDQFDDEDDEFWEDDEEELDMEEVTEEKEEEEDVRYSVAEMTKPGQRLIIARGGEGGLGNACILKEMWLSKAHKEEEMASLSTGHPGTETYLILELKSIADVGLVGMPNAGKSTLLSALSRARPEIADYAFTTLRPNIGSLTYEDYFSVKVADIPGLIKGAHENRGLGHAFLRHIERTKVLAYVLDLAATLNGRKGVPPWEQLRDLVVELEHYQEGLTKRPSLIVANKIDEEGADEMYEELKKRVQGVPMFPICAILQEGVPDLRVGLRDLMGASDPQGIELSKIVVD

SEQ ID NO: 54326 - protein, 430 aa, Oryza sativa
MAPVQTPEQSNGSLTLNPVVQRVLSRGKSLLSPSTPRSPPPSYGSIVTVLSIDGGGVRGIIPGTILAFLEEKLQELDGPEARLANYFDVIAGTSTGGLVTAMLTAPNDNGDPLFAARDINDFYLEHCPRIFPPVSKGPLGLFKSMTGPKYDGRHLHSVVQQLLGDKRVDSTITNIVVPTFDIKLLQPTIFSTYNARKDVSKNALLSDVCISTSAAPTYLPGHRFETTDKDGKPREFNLVDGGFAANNPTLLAMTHVTKQILLGCQDFFPIKPADYGKFMILSLGTGSAKIEKKFDAVESGRWGVLGWLFNKGATPLIDSFSQASADLVDIHASVLFQALHCEKRYLRIQDDELTGDAASVDVSTPENLQRLVGVGKALLKKQACKVDLETGKNEPDMNRKSNEEELVLFAEMLSRERKARLQKKQGSMKI

SEQ ID NO: 54327 - protein, 79 aa, Oryza sativa
MGSKVGTKSIAQIAHELRNKETGEWPTTMQVWKATYQKADGTWSVPNGERVLVYIFTYDNLFFLDFSLNYMICVNVPSE

SEQ ID NO: 54328 - protein, 342 aa, Oryza sativa
MDRKKAGVPLVCHGHSRPVVDLFYSPVTPDGCFLISASKDSNPMIRNGDTGDWIGTFEGHKGAVWSCCLDTNALRAASGSADFSAKVWDALTGEELHSFEHKHIVRACAFSEDTHLLLTGGLEKILRIYDINRPDAAPREIDKSPGSVRTVAWLHSDQSILSCCTDMGGVRLWDVRSGKIAQTLETKATVTSAEVSQDGRYIITADGSSVKFWDANYFGLVKSYNMPCNVESASLEPKYGNKFIAGGEDMWVHVFDFFTGEEITCNKGHHGPVHCVRFAPGGESYASGSEDGTIRIWQLGPATSDEQESPPNANGKLKVNTVSDAARKIEGFHLPKDGQTEG

SEQ ID NO: 54329 - protein, 85 aa, Oryza sativa
MGLWVCNSIWDPSPSGVHPNLMEHDRTLGRPPISINSYVPLQGLGTPRSSSHLHKIARYPFKVYWVLFSKKFSNHYFSLYLRVSA

SEQ ID NO: 54330 - protein, 240 aa, Oryza sativa; identical to SEQ ID NO: 35113

SEQ ID NO: 54331 - protein, 257 aa, Oryza sativa
MDAAVQEAKLLRQVNALIVAHLRDHNLTQAAAAVAAATMTPLAPPEPDGDDSVPANQLLRLVAKGLAVEREETGRGGGAFDSAAAAAGYGGLLPPLGTNAVDFSTQDVKGSSKSFPKHEARHVSDHKNVVRCAKFSPDGKYFASGSGDTSIKFFEVAKIKQMMLGDSKDGPVRPVIRTFYDHTQPINDLDFHPESPILISAAKDNTIRFFDFSKTVARKAFRVIQDTHNVRSVCFHPCGDYLLAGSTIILSPYGFYL

SEQ ID NO: 54332 - protein, 342 aa, Oryza sativa
MARLAVAAALLLVALCRVVHGEADQETAPAYANREAYVEHNGGDAAGTSVAIVPPYLDAAAAARDEPAAAAASPEGPVIPVDDDAADQQGFLRFPCRYHCRYRHHMRHGGHRHGEGFHGKEEKQQLVFEMPVEPATRGEERREEEEGVVLPVAEPDPDSRRQYAAVAAAEEEDEDEMARLHHGRRSHHHHHRHHHHHHDENEEDEHEQADEASPAVERLISFHRRRHHHHHHEDDHEQREEGAPMKRFRHHHEEEEESEMRTKRFHHHHHKDDDERELEEMARRWIRKALMSSRMHHHRGCRFHHHHHHLSFRHRAEDAAAAGEEEEKGGVMSWLKDFVNRF

SEQ ID NO: 54333 - protein, 960 aa, Oryza sativa
METLSSVTNIVVGKLFALLEKKYEQWRGLEDSIGFIKRELRVIHGFLHDQLPRDRNGEDPPISAVQATCIDELRDLAHDIEDCLDRFLPCAACERDSSFLRRLAADSRFAGEVERLKSRLEEAHERRANYGVNGVAGSAAAAGGSSSGSANTTDYMAQSCGLVGINVPRQELLDLLLLEDVEGRPERMRVISIVGFGGSGKTTLARAVYDCPDIAGQFDGRAWVVASKHRDDTMGLLSALLGQIRQEDDQRFNQIPQDDEQRFQLQSQVQADIRQHLNAKRYLLVFDDIEEKQWNCIKSTFPTETRSRVLVTTTIKPVANACSHGTGSVYNMRTLNVNHSKDLLQSVLKEYSPELELDLPSILEKCDGLPLALVSVGNFLWRERITECYRNQVCCNLGHHIEKEHAFAELRQVLANNYNTLPGHPLKTCLLYTTVFPNGCSIRRSSLIRRWLAEGYVQCQYPRSSLEVADANLEELMDRNIIRSMDVTNNGRAKNCRAHGIMHEFMLHKSRCDNFIASLHDPDRSKCRHLFLTQSLTSGNQSYMDCGTNPKGKQPRARSLTIFGNAGEFALDYAKCELLRVLDLEECDDLKDDHVKYIYKLLHLKYLGLGSTITYIPRKINKGLHCLQTLDLRKTRINTLPVEIIIMPHLAHLFGKIKIREARGLWVLETNKIEKILSDKSKLQTLAGFVVDKNSLFPRLMVHMNKLRKVKIWCEPAAERNSSISLISAAIQKFTQAGMDTTGAHSLSLRSRKFPNRLLCCLEKSYGYLSSLKLQGELSRFPQFITSLCGLTELCLSSTNLNKEDLSNVCTLHHLLYLKLVESDLQGFIIKNGDFPRMRHLCLVVQNPNLPTVEKGALPHLLSLQLLCKDLVGLSEIKIEYHDYLEEVALDSMVNIETIEIWENEAKKHPNRPKVLFRKRVDPTDAQSTAKYAATERPVPETGCPAVIKKTEIPCYPIIL

SEQ ID NO: 54334 - protein, 379 aa, Oryza sativa
MGVKTLQVSGFALDDSADYVKDLLERIVGCGNVYAVKLRHPKNVTATSRAYAIVQFQTEEHASLVKNAAQRKILRRGHYYLKVHPSDRDIVPRPRVSMFKLEDVTLHFGCLLKETILSALWSRKGVSVEFGFNLKKIYFYLQLPNSSIEYKLELSHESIWEIQLQRPPKSQTKFLLIQVQAAPKIYEQTPRRSGVMYEDPLFNYFRDHTDDQWTRTTDFTSSSSIGQSYILCLEVPRRCDLPNIRDYFFYYHEYNHDFECRSGGYPYSSDTRFVPIVKSRGYVPYEILFKINHLVQNGTLNGPTVDDSFFRLVSPAFVPIDHIKRALEMMSYLKKTCLNPTSWLSEQYSKFRRSRYVQPSPNISLDDGLVYVYSVFLWT

SEQ ID NO: 54335 - protein, 333 aa, Oryza sativa
MASGDPVDAPAAAAESMEVEADQCLDLTSCQLHDLSEVEIPPTLEELELTANRLAAVDPRIGRLPGLRKLSFRQNLLDDAAVAPLSTWADIAGLQELVFRDNKLTTIPDASIFKGLLVFDVSFNEISSLKGLSKVSSTLKELYVSKNEVAKMEELEHFHALQILELGSNRLRVMENLETLANLQELWLGRNRIKTINLCSLKAIKKLSLQSNRLTSMNGLQECIALEELYLSHNGIQKMEGLSTLQNLRVLDVSSNKLTAIEDVETLSRLEDLWLNDNQIPSLDGIESALASSREKLTTIYLERNPCAKAPNYSSTLKTIFPNLEQLDSDMLA

SEQ ID NO: 54336 - protein, 540 aa, Oryza sativa
MLMATVSPARREPTPQAVRASPMPSAAAALVRRGGGGSGGTVLGKYELGRVLGQGSFAKVYQARHLETDECVAIKVLDKEKAVKGGMVHLVKREINVLRRVRHPNIVQLFEVMASKTKIYFVMEYVRGGELFSRVSKGRLREDTARRYFQQLVSAVDFCHARGVFHRDLKPENLLVDENGDLKVSDFGLAAGPDQFDPDGLLHTFCGTPAYVAPEVLRRRGYDGAKADIWSCGVILFALMAGYLPFHDHNIMVLYRKIYNGEFRCPRWFSKDFTRLITRLLDANPKTRITVPEIIESDWFKKGYKPVKFYIEDDKLYNLSDDVLNLEPADPVPPPLGLAPPVPPPPQGDDPDGSGSESDSSVVSCPATLSTGESQRVRGSLPRPASLNAFDIISFSKGFNLSGLFEERGNEIRFVSGEPMSDIVKKLEEIAKVKSFTVRRKDWRVSIEGTREGVKGPLTIGAEIFELTPSLVVVEVKRKAGDNEEYEDFCNMELKPGMQHLVHQMLPAPNGTPVSEKVERSSSLQAPLTLKLIGTEGSMS

SEQ ID NO: 54337 - protein, 240 aa, Oryza sativa
MASAADEGNAAAPRAAVSHVIFDMDGLLLDTEGFYTEVQEKILARYGKVFDWSLKAKMMGKKATESARIFVDECGLDGLLTPEQFLEERESMLQELFPSCAVLPGVLRLIHHLHANGVPMAVATGSHKRHFALKTQNHKEMFTLMHHVVMGDDPDVKTGKPSPDIFLAAMRRFEGNIEPSNCLVFEDAPSGVAAAKNAGMYAVMVPDSRLDVSYHKGADQVLSSLLDFKPGEWGLPPFTD

SEQ ID NO: 54338 - protein, 174 aa, Oryza sativa
MAKQGVKKTRDANKKRMDLILRLILAANVIYIVVRMAVMHSSFTWKHWIGLAVTSAAYFLPYKQLANMSEPEYSENGELINAGYDLNAGGMSEYLQDVIYITLFVQLMSIFSDKFWWTYLVIPAYGGYKISGLLRGAFFGGSSEGEEEDEKTRKKREKMEKKASRGKIIKTRTR

SEQ ID NO: 54339 - protein, 97 aa, Oryza sativa
MPLPLPIDLISTPPAPGNGAGEPTTGIPAYGVTRSAHWRTTWSATAPRPQTRRASRTMALVLNDTVTGPPPPWPFSAASRARLSVVAMAGSGEQATV

SEQ ID NO: 54340 - protein, 207 aa, Oryza sativa
MTIPSAEGFLHAASCLPCTAEEERDLVVALTREAEENVKDGDLRYLVSHSWWLNWQSYVGLIKPDENDADMLPQAPSRPGEIDNSKLVSEESSSIGDEPELQRTLREGDDYALVPQEVWRKLHEWYKGGPELSRRVICSSPTSRSYIVDVYPLRLKLFDGRDSLERIIKISRKAKVSELYSLVCSLLSVEQSKIDIWDFYQRQREKN

SEQ ID NO: 54341 - protein, 328 aa, Oryza sativa
MGSDFKAIPLIDISPLVGKIDDPSMVNDEDLLQVVQMLDDACREAGFFYVKGHGIADSLMKQVRDVTQKFFQLPYEEKLKIKMTPQSGYRGYQRVGENITKGKPDMHEAIDCYTPIEPGKYGDLAKPMVGSNLWPKYPSNFDVLLENYISLLRDLSRKIMRGIALALGAPVDAFEGTTAGDPFWVCRLIGYPVSTDIPEEQRTDTGCGAHTDYGLLTLVNQDDDICALEVRNRSGEWIYAKPIPGTFVCNIGDMLKVWSNGIYQPTLHRVVNNSPRYRVSVAFFYESNFDAAVEPVEFCRERTGGVAKYEKVVYGEHLVQKVLTNFVM

SEQ ID NO: 54342 - protein, 379 aa, Oryza sativa
MAKDGGGPDWNGLLKWSLAHGDGTAKPRSLSGEDKKWFMEAMQANTMDVVKRMKEITQVMKTPDDVLQSQGVTPENIEDMLDELQEHVESIDMANDLHSIGGLDPLLGYLKNSHAGIRAKAAEVVSTIVQNNPKSQQLVMESNGLEPLLTNFSSDASTNSRTKALGAISSLIRHNQPGVAAFRLGNGYSALRDALGSDDARLQRKALHLLQYLLHDNKADRSVATELGLPKLMMHLASSDDSGVREAALGGLLELARDNTSGAGNVLPDQDKLKDVLKSRIEGISTMDADDLSAHREERQLVDSLWKECYNEPSSLREKGLVVLPGEDAPQQPPPDVVGSMFEPPLRAWAASRPPPKEDSESESAKKDPPLLLGPGPSS

SEQ ID NO: 54343 - protein, 265 aa, Oryza sativa
MYKSRDPKTSDEEEMLENLFDCLCCVLMPMENKERFVKAEGVELMIIIMKQKKLAYSSAIRTLDFAMTRFPPACERFVDVLGLKTAFAAFMGKIPVNKKNKKESYQEALEERVISLIASLFGGITKGSRRIRLLGKFVENECEKIDRLMEFYTRYSERVKAETERLDSLDLDDLEMDEDERYNRKLEAGLYTLQLIALILGHIWHSGNSQMRTRIELLLRQNKLTKDDVKDILEEYHDNIGDLDGPEEKERAQGRTKEIIASLSL

SEQ ID NO: 54344 - protein, 471 aa, Oryza sativa; identical to SEQ ID NO: 49633

SEQ ID NO: 54345 - protein, 731 aa, Oryza sativa
MGLDNNFGELSGMFCGLSYDGYTDHGSQSDYFRFADPQPAIVPQMDAGPSSAASSTASRAAVSSGTDNPEDWEFISDESLNYISRMLMEEDIDEKVSMYQEESAALRAAVKPFYDILGHKFPPSPDRQLVAWPLDSPSESSTSSYPHSLASSVTSSNISGAVDSSQRRYVGHSEYRSLSGHSSQPPVGPSSDVRNAMETLEDPLISNGRIPEYLFESFPTWDFRRGVDEAQKFLPGSDKVVIDLEAGGVAKRQEAGKAISLNVSKAEVLKVKKNRQSEDLDVMEGRNSKQSAFCSDEPDWIEMFDVLLRQTEKKATDLRKMMRFEASKNSQVAQPKGPSGTRSRGRKPTKKDVVDLRTLLIHCAQAVAADDRRTANELLKQIRQHAKPNGDGSQRLAYCFADGLEARLAGTGSQLYHKLVAKRTTASDMLKAYHLYLAACPFKRLSHFLSNQTILSLTKNASKVHIIDFGIYFGFQWPCLIRRLFKREGGPPKLRITGIDVPQPGFRPTERIEETGQRLAEYAEKIGVPFEYQGIASKWETICVEDLNIKKDEVVIVNCLYRFRNLIDETVAIDSPRNRVLNTIRQVNPAIFIHGIVNGSYSVPFFITRFREALFHFSALFDMLETTVPRDDAQRALIERDLFGREALNVIACEGSDRVERPETYKQWQVRNLRAGFVQSPLNQDIVLKAKDKVKDIYHKDFVIDEDSEWLLQGWKGRIIYAISTWKPNNN

SEQ ID NO: 54346 - protein, 696 aa, Oryza sativa
MDDDAGDGAASGGTKRKVTAASSSAAAKGKAAGKGKAASKASALATAKESSLLKQKSPAEFFAENKNIAGFDNPGKSLYTTMRELVENALDSAESISELPDIEIIIEEITKSKFNTMIGLVDRQRIDEELYDDFESAKAREKRLAKEARFQETQAKNAALGKKVKEAPAARGKGRGEAAFFRVTCKDNGRGMPHDDIPNMLGRVLSGTKYGLRQTRGKFGLGAKMALIWSKMSTGLPIEIKSSMKGQNFISFCLLDIDIHKNVPHVHLHEKRENKDRWHGAELQVIIEGNWTTHRSKILHYMRQMAVITPYAQFLFRFLSDSPDKNLTIQFARRTDVMPPIPLQTKHHPSAVDLLLIKRLISETTKQNLLQFLQHEFVNISKSHAERLIGEMGPDFSAKTTVKSLTSQQLVRIHQLIRQAKFDDPSGNCLSPAGEYNLRLGIIKELHPDLVATHASSPQVFEGHPFIVEAGISIGGKDVKHGLNIFRYANRIPLLFEQGADVITRTALKRINWSSYKINQQQDKIGVFVSIVSTKIPFKGTGKEYIGDDITEIASAVQSALKQCCLQLKSKIVKKLQARERQDRKRNLNRYIPDVARAIMETLGEIADESPPKRPRYDKEDEELLEKVNSEEVTEMTFRDCLTQHVEQVDYEMALEYAMQSGVSEEPREALYLNSLEGSYKFIDFQSPVFVFRFIP

SEQ ID NO: 54347 - protein, 446 aa, Oryza sativa
MDGLDDEWDDDKFLAELFRAQDEAVASRNPNPTPPPPPPPPDLISYLPPPSTSSYPSSSAAAAALPLSYITPGPHVFSAAPVHFLPPRELSQHPQGFDVGLRDFSPPRELSQRPAAEVSSREIVAVSSGIAGADRFRGGGGGGARRERDAREAADRREVERLKRELNRVSKQMNDVKNECSELKKDRTRKDLEIKAKEAEIQSLRRANVGSANKYAGSMAMDIDQSVHAPANGALHTGDSCLASTRRAETLNGRNKELSSPQDGLCLNQRNQTYASEVLEESVRFESKGSKHKEIKTVGVQTDLPGNNEYLEHKKVLVDRISSNLCAVWGMPTNSLMGRSLISKILVSCSEEILTLVQSTGSLDKCEASSEASSSVRNAISQVYDIIIKTSSDTIPIQTLLEALLNLAAVGNDAVVSRALRMLHSVLQHLLNNRTMSNQRYALLLH

SEQ ID NO: 54348 - protein, 263 aa, Oryza sativa
MAGLYERPSETYTKKRPRYPDAWFSKLAALTAGHHRAWDAGCGTGQASISIAEHYDSVVATDASEGQIRHAVAHPKVRYLHTPVDLSEDDLVAMVGGEGSLDLVVVATSIHWFDIPLFYAVANRVLKRPGGVLAVWGYNYEIHPFEDKLHGQLYPAMRPYMDPRTRLAMDRYRDLPFPFEPVGVGREGEPADVDIEVDMTLDDLVGFLKTGSVVTTAREKGVDLEAVTKDVMKGVEAEWGDPAVARKLVFKAFMLAGKPKVLN

SEQ ID NO: 54349 - protein, 593 aa, Oryza sativa
MDSIRRRSAGGILGILFLVLLRWAGAGDPYAYYEWEVSYVWGAPLGGVKKQEAIGINGQLPGPALNVTTNWNLVVNVRNGLDEPLLLTWHGVQQRKSPWQDGVGGTNCGIPPGWNWTYQFQVKDQVGSFFYAPSTALHRAAGGYGAITINNRDVIPLPFPLPDGGDITLFLADWYARDHRALRRALDAGDPLGPPDGVLINALGPYRYNDTLVPPGVTYERINVDPGRTYRLRVHNVGVATSLNFRIQGHNLLLVEAEGSYTSQQNYTNMDIHVGQSYSFLLTMDQNASTDYYVVASARFVPDADKLTGVAILHYSNSQGPPSGSLPDAPDDQYDTAFSINQARSIRWNVTASGARPNPQGSFHYGDITVTDVYLLQSMPPELIDGQMRATLNGISYIAPSTPLMLAQLFNVPGVYKLDFPNRPMNRLPKLDTSIINGTYKGFMEIIFQNNATSVQSYHLDGYAFFVVGMDYGLWTDNSRGTYNKWDGVARSTIQVFPGAWTAVLVFLDNAGIWNLRVENLDAWYLGQEVYISVVNPEDSSNKTVLPLPDNAIFCGALSSLQKEQSHRFQYSEASQITQLWKMVFFMAWLALW

SEQ ID NO: 54350 - protein, 700 aa, Oryza sativa
MSRFWRPGSEKPTAAIVEDEEGGVLFLPTSTSSSSSSGFGYASLERQRQRLPVYKYRKAILYLVERHATTIVVGETGSGKSTQIPQYLKEAGWAEGGRLIGCTQPRRLAVQSVASRVAEEVGVRLGEEVGYTIRFEDQTNPGMTMIKFLTDGVLIREMMEDPLLTKYSVIMVDEAHERSISTDMLLGLLKKIQRRRPDLRLIISSATIEARSMSTFFNIRRKNSMLESADHLPNPEPAILSVEGKGYTVEIHYVEEPVSDYLQAAVNTVLIIHEKEPPGDILVFLTGQDDIDAAVKMLNEEIQHRGRHYLDLLILPLYSGLPRGDQDLIFTPTSKGKRKVVISTNIAETSLTLEGVVYVVDSGFSKQKCYNPISDIESLVVAPISKASARQRAGRAGRVRPGKCFRLYTEEFYLKEMQPEGIPEMQRSNLVSCITQLKALGIDNILGFDWPASPSPEAMIRALEVLYSLGILDEDAKLTVPLGFQVAEIPLDPMISKMILSANNFGCSDEILTIAAFLSVQSVWVSMRGVKKEFDEAKLRFAAAEGDHVTFLNIYKGFHQSGKSSQWCYKNFLNHQALKKVIDIREQLVRIIKRFGIPLTSCDRDMEAVRKAIIAGAFAYACHLEEYSQNGMYKTIRTSQEVYIHPSSVLFRVNPKWVIYQSLVSTDKHYMRNVIAIEPSWLTEAAPHFYQFRTPNPALH

SEQ ID NO: 54351 - protein, 437 aa, Oryza sativa
MAAPNNNDAAAGASASATTSEPAPEDTSIEALARRVQEHMTLASNPTARRHKFWETQPVGQFRDAADSSLPDGAIEPPTPLSEVRADPYPLPAAFEWYTCDLDDDALLTDLYALLAHNYVEDDENMFRFNYSPAFLRWALRPPSFFRAWHIGVRARESKKLVAFISGVPARIRARDDVVRMAEINFLCVHKKLRSKRLAPVLIREVTRRVHQENIWQAAYTAGVVLPTPITTCRYWHRSLNPKKLIDVGFSRLGPRMTMSRTVRLYKLPEAPLTPGFRQMELRDVAAVTRLLRAYLAKFVVAPDFDEMDVEHWLLPREDVVDSYLVESPETHEVTDFCSFYTLPSSVLNNANYATLKAAYSYYNVSTKTPLQQLMNDALIVAKQKNYDVFNALDVMENESFLKELKFGPGDGQLHYYLYNYRIRNGIKPSELGLVLL

SEQ ID NO: 54352 - protein, 652 aa, Oryza sativa
MTMAAAPARSAGAAAEKRMVDPPRVVGEYKLLEEIGVGSFAKVYLATHLRTGDVVAVKEIDPRRIDERVRGGILEEKAILSTLSHPNILRLIDTIQEENLYLILEYCNGGDLEGYRTKGGEDARLPDATARDFMRQLAEGLKMLRGRSIVHRDLKPQNLLLSTNGDAITLKIGDFGFARSLVQENLAATMCGSPSYMAPEIMRCEDYDAKADLWSVGVILFQLVTGKLPFYGANLFKLRQNIHESNGVKFPKEIKDDLHPDFIDLCRGLLRLDPKKRISFEGFFNHKFLSTTGSTLYSGGSIQRKREISSEPNHPADLLRDTCQIISSDVLKDKSESVDSRNLQAFDSWEWIEREYVLVQANSTSTEILSSLEKSMKDGTGAKPASYDRSTVKRSAWNQNRNSVSRGVAIKSNGCTPLSTSHESTAAENLLNPPYCYTRLQLLNQYIVVLTELAEEKLFKGLDLEALSVELIILAIWNEALNACSLSTDATHDGFFLTQAHVNFLPKNDHRPSRNVVQGLDFTRLVSVCSWAESGFIKAYDRAEKISHRLRDNNDNTEMPDAVEIIFQTALIYGTTGAAKEVLGYQNRSVALYSKAIILLTFVLQEATNLPLNPPFSLSSSDQQRIHRYIANLRSHLCSAQLTGQQERYVQN

SEQ ID NO: 54353 - protein, 151 aa, Oryza sativa
MSGRKKTREPKEENVTLGPTVREGEYVFGVAHIFASFNDTFIHVTDLSGRETLVRITGGMKVKADRDESSPYAAMLASQDVAQRCKELGITALHIKLRATGGNKTKTPGPGAQSALRALARSGMKIGRIEDVTPVPTDSTRRKGGRRGRRL

SEQ ID NO: 54354 - protein, 58 aa, Oryza sativa
MNFIQTPNIKFVRILIRRLFESVLGSVYKGRNSKGEPFFGVYSSLLFGWVHFPSLFMW

SEQ ID NO: 54355 - protein, 814 aa, Oryza sativa
MAGLVIGCLAVQLSLASLLLCSSASTAQHTLGTGSSLSVADRSRPFLVSPDGTFSCGFIQAGDDGDNAFSFSVWFTAARDGAVVWTANPDAPVNGRGSTISFRHDGELALADTNGTTVWASRTGGGGRGLTVSLRDTGNLVIEDPSTGRAVWQSFDWPTDTLLPSQRFTKDTKLVAGYFSLYYDNDNVLRMLYDGPEIASIYWPLPGVSIFDFGRTNYNSSRIAILDDAGVFRSSDRLQAQASDMGVGVKRRLTIEQDGNLRIYSLNASTGGWAVTWAALSQPCQAHGLCGKNGLCVYLPSLRCSCPPGYEMIDRRDWRKGCQPMFSVGNCSQPAAPERFKSVVVPQTDFYGYDLMFNGSSITFELCRNQCLSDCQCVAFSYRFDGVGRCFTKGRLFNGYTSANFPGNIYLKVSIDFDESSPLVSARSAAGLTCNPNVSIVTVPAAVYGMAPRNSGKWTYLFVFAGVLGVLDLLFIATGWWFLSSKQSIPSSLEAGYRRVMTSQFRRFTYRELKDVTANFKEELGRGGSGVVYRGVLDGGKVVAVKRLAVDVTMQGDEEFWAEMTVLGRINHMNLVRIWGFCSERKHKLLVYEYVENQSLDRHLFDTAEGGGGMSTTTLAWKDRCKIALGTARGLAYLHHECLEWVIHCDMKPENILLTRDFDAKIADFGLAKLSKRDGGAGVELTHMRGTSGYMAPEWALNVPINAKVDVYSFGIVLLEIVVGSRVADQRTEAGERLQLPQIAQALRHVLDSGDVRSLVDARLQGQFNPRQAMEMVRISLACMEDRNSRPTMDDIAKALTAFDDEDEHPAYRS

SEQ ID NO: 54356 - protein, 146 aa, Oryza sativa
MDQMGGCSTFQRHTQHHSRRAAANDGPQHVLMLQKVVKAWRPLRSLLVLYYKEDILPRVDDFDILTWWKANSLKYPVLSHIARDVLAIPASTVPSENAFSTGGRVINDYRSRLTPEIVEALICLQDWMRVVDCPSVGMVLSQEEET

SEQ ID NO: 54357 - protein, 497 aa, Oryza sativa
MHDLYQELAQFVSGNECRMIQHIVSGNECRTIQQSNLNRADKTSARHLSIVNNESHPEQELSLDSFCGQDLRTFLFLSRLEQIIHGEMPLRRKIAPYGLMTDFECLRVLDLSNTDIVEVPKSIGSLIHLRYLGLDNTRIQMLPESVGALFHLQTIKLNHCSSLTQLPHGSKLLQNLRCFEIAHSNVQMPSGIRALTSLQKLPVFVVGDGSAGCGIGELDELINIRGDLHIIGLSNLDAAQAANVNLWKKEGLQKLTLEWCDILQDSDVTLRDLQPNEANRVPDCRCVPQQNDRAAQVLQCLRPNSNLEELIIKGYNGSSFPSWVGSLPLDRLASIELKDCQNCEELPPLGCLPSLKHVVIQSLPSVQLVGPEFLGDVGDIPYNNREKAYFAFPALESLKFRDMGAWEEWSGVKDEHFPELKYLSIVRCGKLKVLPNFTSGPKQRIRNCEKLLQPLCQVCSSSSSQMNTINFSCIDFYIRDFFICKFRCSSALGSFLL

SEQ ID NO: 54358 - protein, 391 aa, Oryza sativa; identical to SEQ ID NO: 35065

SEQ ID NO: 54359 - protein, 329 aa, Oryza sativa
MATSGSSSSPSSPSSPKRQRVAPPPPRRTDMLMALPPDILDDRILALLPFDKLVCTSCLSRAWRRRWESVRNLEIELPRAYSGGGRALWRCARPVRFFSARVARRDVFRAARWLRALARKGVQDLSLEFSLAGKQRPLPGPALFSCAALVQLDLEQCDMPAAPPGFLGFPNLERLDLVYVTLPFAGAGTQLEHLIVAAEKLAVLNLSPVITINGGGVDTWAIRAPKLRKLYITMEMGDDNGCRIPMPLPMLEEVTISFDRLFGTQDFLDAFQNISTVNKLFFKSDKFNINMLEGITCKFENLREGGLIIDFGQRKCSIVSFFTEVCPAH

SEQ ID NO: 54360 - protein, 598 aa, Oryza sativa
MAGGGGKKEKGEGLGRALIRQRNKAAAAVKERGDALAHARRRAQPLESVIEVSDIDAVLERAAEADRLHSALADSVSSSDLVIDLDATGETDEERRRMQKEQEALHAGSLRVPRRPPWNSRMTVEELDENERRAFLVWRRNLARLEENDKLVLTPFEKNIDIWRQLWRVLERSDLLVMVVDARDPLFYRCPDLEVYAKEIDEHKRTMILVNKADLLPMNIRKKWADYFKAHDILYVFWSAKAATATLEGKILSGYSEQDSASLDLDTKIYGRDELLKKLQTEAEFIVAQRRAAAIKEDSRATSSDSVSSVAKHVVVGFVGYPNVGKSSTINALVGEKKTGVTHTPGKTKHFQTLIISEELTLCDCPGLVFPSFSSSRHEMVSCGVLPIDRMTKHREAIQVVADRVPRSVLEQIYKITLPKPKPYESQSRPPTAAELLRAYCASRGHVSHAGLPDETRAARQILKDYIDGKIPHFELPPGMVDTENEHEETSGLEGPTTSAYNESGGSDSDERDDTVDPAQPGMRHVLSDLESFDLATEGSKPAGKKKKEASHKQHKKPQRKKDRSWRVGNDGGDGTAVLRVYQKPAVNLSAVSASDKT

SEQ ID NO: 54361 - protein, 303 aa, Oryza sativa
MEEQEHKTEASDTSADLQEEVSTDVHSSNEVGHILHKHKDEETVREALDILEPDGTNVNFNQQKSGSANQQDAVFSVMGQESRRIEDAIYEDNLFILDEGSEESDSKYPVHAALSSSSSLVGDNTYYTEQETPSTPDEHFAGSLFFSDGGYRLLQTLTGGSRMPSLVIIDPIQQKHYVFPDEIEFTYPSLANFLDHFMNRSLSPYYRSALSVISSKELLRPPFINRDFHEADSIPQLTTSNFCMLVFGFEGCVSKSELPFSNTENISSAWKKDVLVLFSNSWCGFCQRTELVVREVYRSFKNF

SEQ ID NO: 54362 - protein, 82 aa, Oryza sativa
MPHPSPSSQPPRRPCSPASTTPPPSPVETALPPRPLRSQIDTAPFNPPPQAPCIVVVAGVGTGAGAADPESRRRRPLLLLHH

SEQ ID NO: 54363 - protein, 389 aa, Oryza sativa; identical to SEQ ID NO: 51644

SEQ ID NO: 54364 - protein, 87 aa, Oryza sativa
MPMHIDIVHRLCGGQLVDLNRVNAGPDHNRGVPANGAQQFNWSGFSLMLGAAQIMVLAWQVIHVPWPLLPQAIWFSNRFSCILSLAR

SEQ ID NO: 54365 - protein, 550 aa, Oryza sativa
MTRIFVQRGAAGSSSSSSRSGSQTLQQQQQLQATSAVAREEELPPQPHQHPSELTASDNITDHLVEDADNSSNSNKPLGLDDPTSESSSSAEERAVMEKPPKDDSSVIDPAFLVEELTGLQFSDQFEQENLVQSGIGPSQIAGAASHPPPPPAPPAPPPKPSSGNNGLRRMGSGSSNNARIGSSRRPVAWPPVAVRSSASGSRPSSPRSLADSEGYNSADEQGPCYASNYYDSERERMFEHDLRRVRGFEINKMAEDGNCLFRAVADQVYGDPEAYDMARQMCVDYMERERDHFSQFMTEGFTSYCRRKRRDKVYGNNMEIQAFAEMYNRPIHIYSYSTEPINIFQGSYNTDVPPIRLSYHHGNHYNSVVDPRGLTVGAGLGFSSFRGTNNVDRDQVKAAIKAQQDQQIENALLAEGRLYSDLELTEKEIERMVMEASRAEYLKQQQQQLNFRESSTSGAEPSSSAAISGSSRSAGTADRVGEECFVLPDTVLTRSMQLLLAMGFNYIQVMEAYSIFGEDVDSMIYYLVEMGGTGASAGGSNRRKGKAAE

SEQ ID NO: 54366 - protein, 95 aa, Oryza sativa; identical to SEQ ID NO: 48733

SEQ ID NO: 54367 - protein, 735 aa, Oryza sativa
MVLKDYDGTVVWQSDSNSIDVQYAQLLDTGNLVMKNSSGKVVWQSFDSPTDTLLPTQKITAATKLVSTTGLYVPGHYTFHFTDSSILSLMYDDADVHEIYWPDPDRGEYGNKRNRYINTRMGFLDDNGDFVSSDFADQQPFSASDKGSGIKRRLTLDHDGNLRLYSLSNGEWLVSWVAISQPCNIHGLCGPNGICHYSPTPTCSCPPGYEMNSHGNWSQGCKAIVDISCSVAKVQFKFVHLPDTDFWGSDQQLVNHVSWQACMNICRSDCNCKGFQYLKGEGTCFPKSFLFNGRAYPSHFVSPRNMYLKIPISMNISGMPVSQSNVLDSRKHSLNCDQMDEKTRELFPDVHKTSQGETRWFYLYGFAGAIFILEVFFIGFAWFFVSRWDLDALEIQAVEQGYKVMASNFRRYNYKELAKATRKFKCELGRGGSGIVYKGTLDDGRVVAVKMLENVRQCEEEFQAELRIIGKINHMNLVRIWGFCSENSHRMLVTEYIENGSLANILFNENILLEWRQRFNIAVGVAKGLAYLHHECLEWVIHCDVKPENILLDGNFEPKIADFGLAKLLNRGGSNQNVSRVRGTIGYIAPEWISSLQITAKVDVYSYGVVLLELVSGKRVLDLATSANEEVHVVLRRLVKMFANNLSGNEPSWIAEFVDCRLSGQFNYTQVRTMITLAVACLDEERSKRPTMESIVQLLLLVDESCSSNVLCPEMPTRWTTGHAKANASFCIHSL

SEQ ID NO: 54368 - protein, 429 aa, Oryza sativa
MSSPPPAAAAAMAVDDADDDQLASMSTGDIVRATRLLDNETRVLKDELQRTNLEVESYKEKIKENQEKIKLNKQLPYLVGNIVEILEMNPEDEAEEDGANIDLDSQRKGKCVVLKTSTRQTIFLPVIGLVDPEKLKPGDLVGVNKDSYLILDTLPSEYDSRVKAMEVDEKPTEDYNDIGGLEKQIQELVEAIVLPMTHKDRFQKLGIRPPKGVLLYGPPGTGKTLMARACAAQTNATFLKLAGPQLVQMFIGDGAKLVRDAFQLAKEKSPCIIFIDEIDAIGTKRFDSEVSGDREVQRTMLELLNQLDGFSSDERIKVIAATSRADILDPALMRSGRLDRKIEFPHPSEEARARILQIHSRKMNVNPDVNFEELARSTDDFNGAQLKAVCVEAGMLALRRDATEVTHEDFNEGIIQVQAKKKSSLNYYA

SEQ ID NO: 54369 - protein, 295 aa, Oryza sativa
MAGRRRRPFAAPVINYLLLALWLAASSSFAVAVAVAGHGRGRRSHVSSIVTEEMYNKSLFIHKDDAACPARNFYTYAAFLRAADQYPSFGGAGGRDTRRREVAAFLAQVSHETTGGWATAPDGPYTWGLCFKEELKPASNYCDAAVAARWPCFPGKSYHGRGPIQLSWNFNYGPAGEAVGFDGLREPEVVAGDAVVAFKTALWFWMTPRPPSKPYSCHDVMTGRYRPSRADAAANRTAAGFGLTTNIINGGLECNNRTGGDPRVEDRIGFFRRYCGALGVDVGDNLDCAHQLPYS

SEQ ID NO: 54370 - protein, 566 aa, Oryza sativa; identical to SEQ ID NO: 37024

SEQ ID NO: 54371 - protein, 275 aa, Oryza sativa
MVTTGGTSLKDDIVRLYQPVHLLVGTPGRILDLTKKGVCVLKNCSMLVMDEADKLLSPEFQPSIQELIRYLPSNRQILMFSATFPVTVKEFKDKYLPKPYVINLMDELTLKGITQFYAFVEERQKVHCLNTLFSKLQINQSIIFCNSVNRVELLAKKITELGYSCFYIHAKMLQDHRNRVFHDFRNGACRNLVCTDLFTRGIDIQAVNVVINFDFPKSAETYLHRVGRSGRFGHLGLAVNLITYEDRFNLYRIEQELGTEIKPIPPQIDRAIYCQ

SEQ ID NO: 54372 - protein, 444 aa, Oryza sativa
MDTHHSDQYAKSSLQLQFRDTSVSFENNNSVLDKHDITSPQVGMTFETADLAYRFYLEYGYRAGFGVSKRTSHSVDGVKYRATFVCYKGGIARIKPGLKARRRLVAKTGCKAMMVVKYNTTENQWEVVFVELEHNHPCNPEMVRFMMCFKDLPDWQREHRPFNAKTRLNPKIHSGRGRPPNQNKDFMVKKTFSQSNYSIEAAGKAGKLRFAEGDVEALLVFFDKMQAQNSNFFYNWDMDDEGRLRNVCWVDARSRAAYQHFCDVVCFDTVYLTYQFVIPLVAFLGINHHGQFVLLGCGLLGDESPETFSWLFKKWLKCMNDKSPEAIITTHSRPVVKAVAEVFPNTRHRYNLWHIMKELPEMSGRVEDKEAISLRMKKVVFDTITSTDFEREWVEMVNQYNLHDNHWLTTLFEERAKWVPAYVKDTFWAGISTVRRSERLEAFF

SEQ ID NO: 54373 - protein, 868 aa, Oryza sativa
MAAAADARRFAVVPQLDIAQILKEAQQRWLRPAEICEILKNYKSFRIAPEPPNRPQSGSLFLFDRKVLRYFRKDGHNWRKKKDGKTVKEAHERLKSGSIDVLHCYYAHGEENENFQRRTYWMLEEDFMHIVLVHYLETKGGKSRTRGNNDMHQAAVMDSPLSQLPSQTIDGESSLSGQFSEYEEAESDVYSGGTGYHSFTQMQQQQNGIGPVTDASMFSSRVSASSIGNYQGQHAMGHTTNFYSSSQHDSPLVLSDPNLELANNGHESLWNGVMKPDEGTVQMTHLQPPVHPEQGMFTTEGQGVEYLTFDEVYSDGLSLKDIGAAGADVEPFWQLSSATADISATENSVQQNDGSLGAAIGFPFLKTQSSNLSDILKDSFKKSDSFTRWMSKELLDVEDSQIQSSSGAYWNTEEADSIIEASSREPLDQFTVAPMVLQDQLFSIVDFSPSWTYAGSKTKVLVTGRFLHANEVTERCKWSCMFGEVEIQAEISADGTLRCYSPPHKPGRVPFYVTCSNRLACSEVREFEFRPSDSQYMDAPSPLGATNKVYFQIRLDNLLSLGPDVYQATITNPSKEMIDLSKKISSLLANNDEWSKLLKLADDNEPLSHDQQDQYAENLIKEKLHVWLLHKVGDGGKGPSVLDDEGLGVLHLAAALGYDWAIRPTVTAGVNINFRDFHGWTALHWAAFCGRERTVVALIALGAAPGALTDPHPNYPAESTPADLASANGHKGISGFLAESSLTSHLQALNLKEANMSEISGLPGIGDVTERNASQPAIGDSLGAVRNAAQAAARIYQVFRVQSFQRKQAVQYEGDKGGISDEHALSLLSMKPSKSGQLDPLHAAASRIQNKYRGWRGERNFFSSDNEL

SEQ ID NO: 54374 - protein, 593 aa, Oryza sativa
MDAGEIIVAQPSPRLYKSLTFRRIATKERTIPQDEEMKIRSPRFQDESLTAPFILDKKARSKAPTVVLGFECLESTAFNGIATNLVVYLETLLHGSNLASASNVTTWFGTSYLTPVFGAIIADTFWGNYNTILVSLVFYLLGMMLVTFSAFLPTTALCTVVGSSCQQPLLGAQTIAFLGLYLVAFGSGGVRAALLPFGADQFDDDNTADRERKMSFFSWFYICVDFGMIVSGLFIVWIQQNVSWGLGFGIATACIALAFGGLVLATPMYKRRMPTGTPIKSLAQVVVAACRKARLRVPADTTLLYEVHDKINQSKIAHTDQFGFLDKAAVVMESDLEEESNDVAADASWRICTVTQVEELKILLRLLPIWATSIVLSAAYAQLNTTFVQQGAAMNMRIMSFTIPPASMVSFEVLCVLAWVLMYSSVIVPMLNSLSLANGEPSQLQRMGAGRLLMAFAMAVAALVEMMRLDAAGRGESLSIAWQMPQYFALAGAEVFCYIAQLEFFYSEAPESMKSMCTSLALLTVALGSYMSSFIYAVVNAFTAVDGRPGWISDNLNEGHMDYFFWVMAALCTLNFVVYSAFARTYRVKLVVS

SEQ ID NO: 54375 - protein, 472 aa, Oryza sativa
MAMNKLVGAAVRRPGWADLPRDLLESVLGRLPVPDRLRFPGVCTAWQSADAASATARFRAAQPPWLMLPFNPTARRQSPSGGGGGDGRFLEARFLSLSDGRAYAIPQPAPPVSERLCVGSSDGWLVTADAASELHLLNPLTGAQVQLPSVTTLPFVDASRDADGRVASYDLRCCFGDGDNDGDEVLVPPESFAPDRLRYELYEKAILVAPPRRQTTPPGSWGGYAVLLICQPLYRLAIARAGDTKWTLLDMPSRCWVDAVRAASAPAADGHQAVYTLDSVGRVEAWDMDVTAAGTTPPPPREIAPPCCCSGRACSMSIPCSKYLVELSPGHLLQVHRLRDKAHARSKWEPRQERVEYTTVKAELFEWNAAGGGHGEWARVDGAGAGILAGRALFLGKSASLCVPADCCPEVKGNCVYFTDDGPWSHERCHEVVPDVGVLDLADGSYKVPRGAVRDLLWKWPPPVWVFPSCTN

SEQ ID NO: 54376 - protein, 849 aa, Oryza sativa
MEDVCEGKDFSFPAEEERVLKLWSELDAFHEQLRRTKGGEEFIFYDGPPFATGLPHYGHILAGTIKDVVTRHQSMRGRHVSRRFGWDCHGLPVEFEIDKQLGITNRQQVFDLGIGKYNETCRGIVTKYVAEWEAVVTRTGRWIDFKDDYKTMDINFMESVWWVFSQLWEKDLVYKGFKVMPYSTGCKTALSNFEAALDYRTVPDPAIMVSFPIIGDADNAALVAWTTTPWTLPSNLALCVNANLVYVKVKDKSTGAVYVVAESRLGQLPAKAKSSGKKQAPSKGGTAEVVQGGLDTEAYELLAKFPGSSLVGLKYKPLFDFFLELQETAFRVIADNYVTDDSGTGVVHCAPAFGEDDHRVCLAAGIIEASGLVVAVDDDGCFIEKISEFSGRYVKEADRDIINSVKDKGRLVSKGSIEHSYPFCWRSGTPLIYRAVPSWFVKVEKIRDQLLECNKQTYWVPDYVKEKRFHNWLEGARDWAVSRSRFWGTPLPLWISQDGEEIVVMDSIEKLERLSGVKVNDLHRHYVDGITIPSSRGPEYGVLKRVEDVFDCWFESGSMPYAYIHYPFENRELFEKNFPGNFVAEGLDQTRGWFYTLMVLSTALFGKPAFKNLICNGLVLAEDGKKMSKSKKNYPSPVEVIDEYGADALRLCLINSPVVRAESLRFKRSGVFGVVKDVFLPWYNAYRFLVQNAKRIEIEGFSAFSPIDQASLLKSSNVLDHWINSATESLVSFVHQEMDAYRLYTVVPYLVKYIDNLTNIYVRFNRKRLKGRTGEEDCRVSLSTLYHVSIYCAVHCFYLSLFYGLMRIKISMLYVSQYLMFTFSCLPASENSKRSLHHLLCTSPLFLDV

SEQ ID NO: 54377 - protein, 931 aa, Oryza sativa; identical to SEQ ID NO: 44646

SEQ ID NO: 54378 - protein, 465 aa, Oryza sativa
MVGSYAAGGGRGAAVAAVAEGKLDELRRRMGKADGDLLRIVGVGGGAWGSAFCALLQDAYGRHRDKAQVRVWRRPGRAVDRATAEHLFEVINSREDVLRRLIRRCAYLKYVEARLGDRTLYADEILRDGFCLNMVDTPLCPLKVVTNLQEAVWDADIVINGLPSTETREVFGEIGRYWKERIRPPVIISLAKGIEASIDPVPRIITPTQMISNATGVPLENILYLGGPNIASEIYNKEYANARICGADKWRKPLAKFLRQPHFIVWDNSDLITHEVMGGLKNIYAIGAGMVAALTNESATSKSVYFSLCTSEMIYITHLLAEDPEKLAGPLLADTYVTLLKGRNAWYGQKLAKGELTLEMGDSIKGKGTIQGVSAVHAFYELLSQSSLSVTHPEVKKLVAPVELCPILKTLYKILIKRELATDSILQAIRDESMYDPRERIEMSQRQCLYRPSLLGLPKVDITQA

SEQ ID NO: 54379 - protein, 446 aa, Oryza sativa
MRIARLLLLLALVAGAAVAQDAGLGDVAAEETTAARAKEEAALAAELGQLRAKISALESSITKQTQELKSKDDGIQKLEKLIEEKSKKIATLQSEITSLETKRSLAAEEQAGKANARAIELEKQIEKLKKDIEAQNSKKSTVEARAGDADKKVQELNAKLEKLQKTSDEQKRRIQKTEHALKVAEEELMRVQLETTTQLNQLKEVHGAWLPPWLVTHTARAKEMMLSHWNEHGKPAVNSLLQKASEKSVQAKKWAEPHVEAAKTKWIPVIKEKWVTMKTNAEPYVQKVSAKSIELYQASKDVVLPHVVKAHKIADPYFQEAKKVSKPYIDQVAKATKPHVEKIRIYLKPYTKRAVHIYGNFLEKATAYHQQAQATVLDYLHQHELTKEFATEELAWYLASVLLIMPIYVFYNVLVETFCSKKKKKATRNVNANHGHRKHKRRHADK

SEQ ID NO: 54380 - protein, 395 aa, Oryza sativa
MPFPLDDESTGQDEGPVSDSKSAIKSYGFATSKRLDKTSGQSPTKHSSLVSKYIRGNNYASSSQRLDHPRRIKENKGDEGHNPKGGYPEDSPIIDSLEFVDQEYVFVHPEGSSSSMNDSRQRTMPSKLDSSSLSPPKLLTAVSAPRPIHGMAINRQQSGGTGSLDSHCSPVSGTSQGSADLNDAMDQPPSDCLTRVRLLEQYASTIAELVKEKIKDAKHLEGFSIQLVVLATWKQAIYICTSYASSATRENPSHDVTAKGFGSNAPHLLANSQLLYDTCMEIESQFLVQMEYAEELANTIGQTVDATEMPDAIEIIFQTALNLGRHGGVDEMMGKSASAMVLYSKAVSMLRFLLTEAPSLALNPALSLTRDDRRRLRTYIEAVNARLVPLQYQRH

SEQ ID NO: 54381 - protein, 745 aa, Oryza sativa
MAGSGGGVVSGGRQRGPPLFATEKPGRMAMAAYRVSAATVFAGVLLIWLYRATHLPPGGGDGVRRWAWLGMLAAELWFGFYWVLTLSVRWCPVYRRTFKDRLAQSYSEDELPSVDIFVCTADPTAEPPMLVISTVLSVMAYDYLPEKLNIYLSDDAGSVLTFYVLCEASEFAKHWIPFCKKYKVEPRSPAAYFAKVASPPDGCGPKEWFTMKELYKDMTDRVNSVVNSGRIPEVPRCHSRGFSQWNENFTSSDHPSIVQILIDSNKQKAVDIDGNALPTLVYMAREKKPQKQHHFKAGSLNALIRVSSVISNSPIIMNVDCDMYSNNSESIRDALCFFLDEEQGQDIGFVQYPQNFENVVHNDIYGHPINVVNELDHPCLDGWGGMCYYGTGCFHRREALCGRIYSQEYKEDWTRVAGRTEDANELEEMGRSLVTCTYEHNTIWGIEKGVRYGCPLEDVTTGLQIQCRGWRSVYYNPKRKGFLGMTPTSLGQILVLYKRWTEGFLQISLSRYSPFLLGHGKIKLGLQMGYSVCGFWAVNSFPTLYYVTIPSLCFLNGISLFPEKTSPWFIPFAYVMVAAYSCSLAESLQCGDSAVEWWNAQRMWLIRRITSYLLATIDTFRRILGISESGFNLTVKVTDLQALERYKKGMMEFGSFSAMFVILTTVALLNLACMVLGISRVLLQEGPGGLETLFLQAVLCVLIVAINSPVYEALFLRRDKGSLPASVARVSICFVLPLCILSICK

SEQ ID NO: 54382 - protein, 340 aa, Oryza sativa
MGGVAAGTRWIHHVRRLSAAKVSADALERGQSRVIDASLTLIRERAKLKAELLRALGGVKASACLLGVPLGHNSSFLQGPAFAPPRIREAIWCGSTNSSTEEGKELNDPRVLTDVGDVPIQEIRDCGVEDDRLMNVVSESVKTVMEEDPLRPLVLGGDLSISYPVVRAVSEKLGGPVDILHLDAHPDIYDAFEGNIYSHASSFARIMEGGYARRLLQVGIRSITKEGREQGKRFGVEQYEMRTFSKDREKLESLKLGEGVKGVYISVDVDCLDPAFAPGVSHIEPGGLSFRDVLNILHNLQGDVVAGDVVEFNPQRDTVDGMTAMVAAKLVRELTAKISK

SEQ ID NO: 54383 - protein, 413 aa, Oryza sativa; identical to SEQ ID NO: 31558

SEQ ID NO: 54384 - protein, 378 aa, Oryza sativa; identical to SEQ ID NO: 35232

SEQ ID NO: 54385 - protein, 427 aa, Oryza sativa
MEPPPRGTKRPLPADADADADAAGGDDDDGALPGERKPRFPKGKKAKYRDPAAAAAAEGIDGLINPELAAERRARRRHRKDEDDQQGVASDVRGFEVRYEDSANLVDDGIRLEPFNLEQEREEGYFDENGNFVEYARGNDIKDAWLDSVEVDTKYAEKVQKKREKEKEEEFQDLSSDDIGKIKRRISNILEPGETIIQALKRLKNTSSDKRGKMTEGTKRIFDELTEAAMKLMENGEYNVYSDDRETFEREAAGYERLARARLGLPEAEEDMFADSPKDKTTASLLDMEPGPSAAHTSTTTTTSKEDDSDFDMFGDDDDKTDVKRDSDANAVGSGSNPEQVSHDANETSGAEKGENGSVSSDYVYDPTSGYYYSSSTGYYYDSTSGCYCSASTGAWYSYDEQTGEYKEIQSEQASTVNETPGDGIKE

SEQ ID NO: 54386 - protein, 182 aa, Oryza sativa; identical to SEQ ID NO: 45633

SEQ ID NO: 54387 - protein, 893 aa, Oryza sativa
MPLDPDSSPAPPHRDWFFPPAPPFLPSSRARTPRAPFPSTSRSSNPYSFPDRRPPPTPRSRSRSPLPPPEQQKQQQPPPTTPPPAPRRRDPRYAGVRRGDVRTLTAEKAAAAAAVPTAAQVHGSKSAASATTLRWSGMVSVAAIVLCFSSLVRSNSSLHDQVHHLKAQLAEATTKLQSCITESSMDMSSILSYQSNNSTSQNRGLKNFSLLLSLSTLYAPLLILKYMDLFLKLRSSQDSEEEVPINKRLAYRVDIFLSLQPYAKPLVLLVATLLLIGLGGLALYGVNDDSLLDCLWLSWTFVADSGNHANAEGFGPKLVSVSISIGGMLVFAMMLGLVTDSISEKFDSLRKGRSEVIEQSHTLVLGWSDKLGSLLNQIAIANESLGGGTIVVMAEKDKEEMEADIAKMEFDLKGTAIICRSGSPLILADLKKVSVSKARAIVVLAEEGNADQSDARALRTVLSLTGVKEGLRGHIVVELSDLDNEVLVKLVGGALVETVVAHDVIGRLMIQCARQPGLAQIWEDILGFENCEFYIKRWPQLDGMQFEDVLISFPDAIPCGIKVASYGGKIILNPDDFYVLQEGDEVLVIAEDDDTYAPAPLPKVMRGYLPKDFVVPKSPERILFCGWRRDMEDMIMVLDAFLAPGSELWMFNDVPEMDRERKLIDGGLDFSRLENITLVHREGNAVIRRHLESLPLESFDSILILADESVEDSAIQADSRSLATLLLIRDIQAKRLPFREAMVSHVTRGSFCEGSWIGEMQQASDKSVIISEILDPRTKNLLSVSKISDYVLSNELVSMALAMVAEDRQINDVLEELFAEQGNEMQIRPADLYLREDEELNFFEVMLRGRQRKEIVIGYRLVDAERAIINPPDKVSRRRWSAKDVFVVITEKE

SEQ ID NO: 54388 - protein, 336 aa, Oryza sativa
MAQQQPRRVLRVAPPGRGGARAEAERGEEGEAVFATVQAAVDAVPVGNRVRTVIRLAPGTYREPVYVAKAKNLVTLSGEAGSPEATVITWDNTATRIKHSQSSRVIGTGTFGCGTIIVEGEDFIAENITFENSAPQGSGQAVALRVTADRCAFYNCRFLGWQDTLYLHYGKQYLRDCYIEGNCDFIFGNSIALLEHCHIHCKSAGYITAHSRKSSSETTGYVFLRCIITGNGEAGYMFLGRPWGPFGRVVFAHTFMDRCIKPAGWHNWDRSENERTACFFEYRCSGPGFRPSNRVAWCRQLLDVEVENFLSHSFIDPDLDRPWLIQMMAIKVPVSA

SEQ ID NO: 54389 - protein, 518 aa, Oryza sativa
MASHRAAVFAVLTLLLSVAAIAMARPIRRSDLGLGLGANGGLGVGLGLDIGLGGSGSASSSGQGSGYGAWSGPNGGSYTASGHGLGLGSGYGYGSGSAYGAGNGGSASGCGSGSTSCSGSGSGSVGLGTSINVGVGVGANGGTNGGSDCDTGSGSNYGSSTGSSSGYGSGGVSYRSRGHGGSSSIGSGSGVGLGATSGAGAGSNVGPSGGCSTCGSGSRSGSGAGGGSYSGSNSGSSSSSGSGSNSNSIGGSGSSSGAGSGSSASSGYGGSSSGSMSGSGSSSSSGSTGMSYGSSGAGSFSGSSSGSNSNAGSMSGANSGAGSSSSAYGASGSGSNSMSDSGSSSGSVSASGSGSSNSGAGSGSSSSSWSGSNSGSGTMSGIDAPSSTGTSSTAESNSGSATSVTGANSGSYSSAWSNSNSNSGSTMPSGIGVASNAGSSSGSWSNAGSNTGTLSGAGSSNWSSSTSGSTSSSGLGGGQGVGSRFGSGAQPTFGMGGGGGFGAGYGFGAGAGGWGKHH

SEQ ID NO: 54390 - protein, 620 aa, Oryza sativa
MEITQWLMDEVENGSIQQLKVLSVVGFGGIGKTTLAKQVYNQLKKRFNFTSFVSVSQNPDMVKLLRNLLSGTGFQGYGILDDHQKLIDTLRGHLANKRYLIVVDDIWNTQAWSIIRCAFAQNNHGSRVIVTTRVEDVATKCCVDFHGMVYKMEPLNEFNSQKLFCKRIFDSDSIPEQYRNVSEDMLRKCKGVPLAIISIASLLSSEGMNVGKWKKIHNFMGSESETNPTLEWMRHVLNLSYLDLSHNLKTCFLYLGIYPEDHTIFKADLIRLWIAEGFIHEKPGLDLEETAESYFNELINRSMIKLDDYRSSEACHVHDLMLDLIISKCQEENFITIASKQPVKNVTKLPVRRLCHQLSYGNLAMERMKLSQVRSYNTFPAFGCSMQPPISMFEHLRVLELRAYSTSVFLDLSAVSNLFLLRHLSIRGFRLKLPQKIGRLQCLRTLDLLGSLLVTGFPSDVISLSSLCHLTVSGDAVLPNGIQKLVSLQTLLTFNSGGLPDIFTIVEKISRFNSSAFRLAKTRRFNNGGLRSTNGGLRSPPASLEFPSFDDGWPTESILDYLSQHLDTPASSHSDLFSPNLVACSPHILNFASLWLQQLIIRKNIRNVPSWLWFSLSSQC

SEQ ID NO: 54391 - protein, 796 aa, Oryza sativa
MDTPPSAAAATATAVASDSDCDSALVADVAEALVSASRLPEPPPIPALLALYLPRLAASHHPRVLSLAASHPGLASPDLLLAYRRHLSPPSCLPSLVPLLPVLPYRHLLPLLLSFVPLDPLRHLHRHLLAHLPTSPLADAALSAYARLRLPHLAAQLLHSLRRRRGVRPSLQAANAVLSALSRSPSTLPQASLDVFRSLIELRLHPNHYTFNLLVHTHCSKGTLADALATLSTMQGFGLSPDAVTYNTLLNAHCRKGMLGEARALLARMKRDGIAPTQPTYNTLVSAFARLGWIKQATKVVESMTAYGFEPDLRTYNVLAVGLCQAGKVDEAFRLKDEMERLSTALPDVVTYNTLVDACFKWRYSSDALRLLEEMRDKGVKPTLVTHNIVVKSLCKEGKLEEALGKLEKIAEEGLAPDVITYNTLIDAYCKAGNVAKAFTLMDEMVGKGLKMDTFTLNTVLYNLCKMKRYEDAEELLHSPPQRGFVPDEVSYGTVMAAYFKEYNPEPALRLWDQMIERKLIPSISTYNTLIKGLCRMERLKEAIDKLNELVEKGLVPDETTYNIIIHAYCKEGDLENAFRFHNKMVENSFKPDVVTCNTLMNGLCLHGKLDKALKLFESWVEKGKKVDVITYNTLIQSMCKVGDVDTALHFFDDMEVKGLQPDAFTYNVVLSALSEAGRSEEAHNMLHKLADSGKLSQSFACPLLKPSSADEADVKEHEGKPEAESSEKAQDNALETYMERLNGLCTGGQLKEAKAVLDEMMQKGMPVDSSTYITLMEGLIKRQKRQTHAAGQSTL

SEQ ID NO: 54392 - protein, 344 aa, Oryza sativa
MSDALINGVAGAGGGIIAQLLTYPLQTVNARQQTERDPSKPAFKDGAVRQMCLVVKHEGWERLYGGLMPSLVGTAASQGVYYYFYQIFRSRAEAAALQRSRRGIGDGSVGMLQSLTVAALSGCVNVLLTNPIWVIVTRMQTHRKANKQQSPLDLTCVLDKALQAPAVENIPHKTIHVIQDLYKEAGFLGFWKGVVPALIMVSNPAIQFMLYETLLKKLKKRRASNLKGADGLTALEIFLLGAVAKLGATVVTYPLLVVKARLQVKQIIDDDKRHRYKGTFDAITKMIRYEGLSGLYKGMSTKIVQSVFASALLFMIKEELVKGARLLVTGNTSLVKKLPSKPLR

SEQ ID NO: 54393 - protein, 132 aa, Oryza sativa
MDAKNLGNRRQNHEKSTMTEDARSRDQETLQRFADSDITVSPVNSHESGDVNMEAAISAEDVLRAGGFGAKDDIGSLLPTAVDSTDFEASLRDARDFEGESEKPSHPGLGYKANETDSGGKPSDVQQQQQQQ

SEQ ID NO: 54394 - protein, 489 aa, Oryza sativa; identical to SEQ ID NO: 31638

SEQ ID NO: 54395 - protein, 268 aa, Oryza sativa
MVTALAHVIRAAPDLHLPHHPSSSASAAAHPQQASSFYPTAAAAASSPSDQLAAAAAAEEQGRRRHYRGVRQRPWGKWAAEIRDPKKAARVWLGTFDTAEDAAIAYDEAALRFKGTKAKLNFPERVQGRTDLGFLVTRGIPPAATHGGGYYPSSSPAAGACPPPRQQQTVVPYPDLMRYAQLLQGGVGGSYMPFGGAATMSSSTVSSSSAPQILDFSTQQLIRAGPPSPMPSSGSGSATAAASSTTSASSPGAWPYGGSERKKKDSSS

SEQ ID NO: 54396 - protein, 119 aa, Oryza sativa
MAMATSTFSPPASQLSLTAAASTRAPTSSPSPPRASAPASASPAPPPGRPPWRLSRRRRASRRPSRPPLRPTGPPSRPRSRRRRRRRPRCPSSGTRGGSTGRGTSGSSRRAAPSTGTPS

SEQ ID NO: 54397 - protein, 563 aa, Oryza sativa
MHRLRHHAALASSRLLVRDNQRITALARAGDVAAARRVFDAMPRRDAVSWNALLTALWRAGRDLPAARSLFDDMPSRNVISWNSIIAGCLAHGDLAAASAYFARAPRRNVASWNAMLAGLVRLGSMEDARSLFDQMPERNVVSYTTMVDGLARCGEVASARELFDAMPTRNLVSWAAMISGYVDNNMLEEARKLFEAMPEKNVVACTAMITGYCKEGDLQNARRLFDGIRAKDVISWNAIISGYVHNGLGEEATKLYIIMLREGIKPDQATLIALLTACSSLALLRQGRSTHAVVIKAMLESSISICNALMTMYSKCGNVDESELVFMSLKSQDIVSWNTIIAAYAQHGRYQKVIALFHEMELCGLIPNDITFLSMLSACGHAGRVDESLKLFDLMFSKYAISPRAEHYACIVDILSRAGQLEKACSYIKEMPSEAEKNVWGTLLCASQTHGNVQLGELAAKMLVLSDFESSGAYVMLSNIYAAAGMWGEVNRVRSQMKEKGVKKQPGHSWTEIADKVHMFVGGDASHPEMDMILSELRKISFHMQMVTDKTQMMEELVQECG

SEQ ID NO: 54398 - protein, 618 aa, Oryza sativa
MISGHDFYTVMAAVVPLYVAMFLAYGSVRWWGIFTPDQCSGINRFVAIFAVPLLSFHFISTNDPYAMNLRFLAADTLQKLLVLAGLAAWSRLPSRTGAPRLDWSITLFSLSTLPNTLVMGIPLLIAMYGPYSGSLMVQIVVLQCIIWYTLMLFHFEFRAARMLIADQFPDTAASIVSLHVDPDVVSLEGGHAETEAEVAADGRLHVTVRRSSVSRRSLLVTPRPSNLTGAEIYSLSSSRNPTPRGSNFNHADFFAMVGGGPPPPTPAAVRGSSFGASELYSLQSSRGPTPRQSNFDEHSARPPKPPATTTGALNHDAKELHMFVWSSSAYPVSEVSGLPVFSGGGGGGALDVGAKEIHMVIPADLPQNNGSGKEHEEYGAVALGGGGGGENFSFGGGKTVDGAEAVDEEAALPDGLTKMGSSSTAELHPKVVDVDGPNAGGGAAGAGQYQMPPASVMTRLILIMVWRKLIRNPNTYSSLLGLAWSLVAFRWHVSMPAIVEKSISILSDAGLGMAMFSLGLFMALQPSIIACGKSAAVVSMAVRFLAGPAVMAAASIAIGLRGTLLHVAIVQAALPQGIVPFVFAKEYNVHPAILSTAVIFGMLIALPITLLYYILLGL

SEQ ID NO: 54399 - protein, 492 aa, Oryza sativa; identical to SEQ ID NO: 31254

SEQ ID NO: 54400 - protein, 494 aa, Oryza sativa
MGGRVSKAVACCCCRSQHHGVVVESSEKTAEEDHGESYELPAFQEFSFEQLRLATSGFAVENIVSEHGEKAPNVVYKGKLDAQRRIAVKRFNRSAWPDPRQFLEEAKSVGQLRSKRLANLLGCCCEGDERLLVAEYMPNDTLAKHLFHWEAQAMKWPMRLRVVLYLAEALEYCTSKGRALYHDLNAYRVLFDDDCNPRLSCFGLMKNSRDGKSYSTNLAFTPPEYMRTGRITPESVIYSFGTLLLDVLSGKHIPPSHALDLIRDRNFNMLTDSCLEGQFSNEEGTELVRLASRCLHYEPRERPNVRSLVQALAPLQKDLETPSYELMDIPRGGATSVQSLLLSPLAEACSRKDLTAIHKILEKTGYKDDEGTANELSFQMWTNQMQDTLNSKKKGDNAFRQKDFSSAIDCYSQFIEVGTMVSPTIYARRCLSYLMNDKAEQALSDAMQALVISPTWPTAFYLQAAALLSLGMENEAQEAIKDGCAHETSSSSGH

SEQ ID NO: 54401 - protein, 239 aa, Oryza sativa
MASSQCWENPPALDPAGGGGEVVGDFGGQKAYVAGSAGSKAAVVLISDAFGFEAPNLRKIADKVALFGYFVVVPDFLHGDPYQPDNPNNPGIWLQSHNPKEAFEEAKPVIAALKEKGASFIGAAGYCWGAKVVVELGKVHEIQAAVLLHPSLLAVDDIKEVKCPISILGAEIDKTSPPELLKQFEQILSPNPEIAHFVKIFPGVEHGWAVRYNHDDAAAVKSAEEALEDMMDWFKKYLK

SEQ ID NO: 54402 - protein, 324 aa, Oryza sativa; identical to SEQ ID NO: 31015

SEQ ID NO: 54403 - protein, 661 aa, Oryza sativa
MGRLSCIKRLPRFALRRGVSDAFLRPLLRTAFLLRRRRRLSTAESTHPPRRGRFRRDPDSDESKLVSLARQRGAAAARAMFDGMPRRDDAVAYAAMVGIHLWDRDLPHAEALYRAAPPDCRGIHLDTVMLDGYVKAGQVDRARRLFDGMAVKNVVAWTCMVSGYCRAGLVDEARRLFDLMPYRNVFSWTTMVQGYAHNGMLREAREMFDKMPERNVVAWTVMVKAYVDNGCIQEALELFNRMPQMNSYSWNAMATGLMSAGKVDDAVQLFDKMPHKNVVSWTIMVTGLAQNGFVSRAREFFDRMPKKDIPAWNSMITAYTNDGQVNDAQRLFDIMPSKNLVTWNIIIDGYSMNNLKDEALRLFLLMLRSAVSPDSTTLISVLVVSESTMEVRQIHGLSTKLGYQPETNLGNTLVSMYSRSGDLSSAWLAFRRLNEKDAITWTSMIQALANHGCAPCALQGFAQMLRCGYKPSSTTFTAVLSACNHVGLVEKGRKIFKSISHVYGLGPTIEHYSCLVDLLGRAGYVREAKEVVDGMQRDMCDEAILGTLLGSCMTHNEVEVGRAVGEDLVKIDPSGSGGYTLLANVFASGGMWNEVASVWKIMKGSKVKKTPGFSQIEVNARNHVFYSRDQMHSQRTEIYEMLNSRLVPQMKGSSSLGTDFY

SEQ ID NO: 54404 - protein, 711 aa, Oryza sativa
MPQDDDWFWGRPTPVVVGDGETTSKPKPPVAGKTKKVEEQHPRRPGEPDCSYYVKFGSCKFGISCVYNHPDPRPQHGADDKKPAEQFPRRPGEPDCSYYVKFGSCKFGMNCRFNHPPRMPVPPQQEYFSGNACHCHHIEGKSKVEQVKLNVLGLPLRPGTGLCSYYMNRGICKFGTNCKFDHPDPGSDHEKWVVSSNANQVSSQVNIYSVLDHGESNEHTFTSEEVHQPGIPSFHQRISYTRDQLLQLCQNVEVPKDILKFCQDINVELNGEDKISGFGAEKDHVQTPSYKRFDATDSRDWHSWSAQTNWEQKFWDNFSEAKEPYSLGWKQEKFNKPDQSSFHFDSKDQWLKFIKCTPCKSTLIKAEVPLSIQRGIISGKDEVLKTLKSILNTFSPKMFDLQKGQLIETRISSADILKDVINLIFEKVVAEPAFCSTYAQLCTYLNQNLTPFPPEDCDCEEITFKRALSNKCQEIFESAHTVCSEIGKLIGQDREMEQRDKERVVKLETLGNINFIRALLKKKLITNKIIDHIVQAVMDCCKFRFEPLGKVDLLNIIFEGMLDSDSAGDESNICVNAMIGGNKSSIASNDVEMTRKNVNRQNEEAILQKSYDEVPNNKMDPQKNYADGAISYLIEKEKPTNLESSVRICRGGCSISEIMELVVDAGAVEGSDEHFMATLLFIKPEYREIFLTLDTREGRLGWLKRMYKVKE

SEQ ID NO: 54405 - protein, 404 aa, Oryza sativa
MAPPGTSRRRGRRGRRAAGRCAGLPLDALFEIMLRLPARDVCRLRAVCRSWRAVASDRAFVDAHASRHPGPYVAACFSDEADGGDGDESCGGVDIVDLSSGDIVKTIYTEVSGSRVQRTRLDLVCLVEGPSPLDVTVLDPVTGATYIPAKSISADNKDLLSSGRLIMESCAFGKVPSTGEYKVVRLLGSGNPCELYECEIMTVNSAGALQWRAIQGPQLPVCSSNNMRSVVINGVAYFLLDYSRLYCSNDGLLIRPGNIVPFDLETEEWVGILNGPKPVARGRDMIVISSTLEIMEPLSLADLNGSLVMVHAVYGSPMDLWFLSDLEQGLWVKKYSIDFEYYNNNAYPLLLLDDEKIVFLLRGTNVLQSYDLKDDTYTDILVVPDFRSVGIYTGDLLSLEGGLN

SEQ ID NO: 54406 - protein, 466 aa, Oryza sativa
MLRDGSLLPASGQFECLYSPVNSSQLRRQPLSVATLPDGPSLVHCPAGPSRVAVSLSLAQSVPVAPLQWDRLVYTALIDSKDNSTVVFAKGMNLRPGRLGVPSRYECVFGRDFSKPKLVVTSPVVSAAQEIFRCVTPVRIRRYLRMTTGGKNSVNNDDKPMLVSIRTKGRGSSTLPSIAQPEPLPRYNKHWRRKAHSMCVCTMLRNQARFLREWIIYHSRIGVQRWFIYDNNSDDGIEEVLNTMDSSRYNVTRYLWPWMKSQEAGFAHCALRARESCEWVGFIDIDEFLHFPGNQTLQDVLRNYSVKPRIGELRTACHSFGPSGRTKIPKKGVTTGYTCRLAAPERHKSIVRPDALNPSLINVVHHFHLKEGMKYVNIGQGMMLINHYKYQVWEVFKDKFSGRVATYVADWQDEENVGSRDRAPGLGTKPVEPEDWPRRFCEVYDNGLKDFVQKVFTDPHTGNLPW

SEQ ID NO: 54407 - protein, 518 aa, Oryza sativa
MATLLLLAVAAAAAAWVWWGRYAWRARAGARRLAAQGVRGPRRGGLLRGCNDEVRRRKAEAEADGVAMDVGDHDYLRRVVPHFVAWKELYGTPFLYWFGPQPRICVSDYNLVKQILSKKYGHFVKNDAHPAILSMIGKGLVLVEGADWVRHRRVLTPAFTMDKLKVMTKTMASCAECLIQGWLDHASNSKSIEIEVEFSKQFQDLTADVICRTAFGSNSEKGKEVFHAQKQLQAIAIATILNLQLPGFKYLPTKRNRCKWKLENKLRNTLMQIIQSRITSEGNGYGDDLLGVMLNACFSTEQGEKRDELILCVDEIIDECKTFFFAGHETTSHLLTWTMFLLSVYPEWQDRLREEVLRECRKENPNADMLSKLKEMTMVLLETLRLYPPVIFMFRKPITDMQLGRLHLPRGTAIVIPIPILHRDKEVWGDDADEFNPLRFANGVTRAAKIPHAHLGFSIGPRSCIGQNFAMLEAKLVMAMILQKFSFALSPKYVHAPADLITLQPKFGLPILLKALDA

SEQ ID NO: 54408 - protein, 597 aa, Oryza sativa
MGGEAPEARRLDRAMSFGGAGSIPEEALHLVLGYVDDPRDREAVSLVCRRWHRIDALTRKHVTVPFCYAASPAHLLARFPRLESLAVKGKPRAAMYGLIPEDWGAYARPWVAELAAPLECLKALHLRRMVVTDDDLAALVRARGHMLQELKLDKCSGFSTDALRLVARSCRSLRTLFLEECSIADNGTEWLHDLAVNNPVLETLNFHMTELTVVPADLELLAKKCKSLISLKISDCDFSDLIGFFRMAASLQEFAGGAFIEQGELTKYGNVKFPSRLCSLGLTYMGTNEMPIIFPFSALLKKLDLQYTFLTTEDHCQLIAKCPNLLVLAVRNVIGDRGLGVVADTCKKLQRLRVERGDDDPGLQEEQGGVSQVGLTTVAVGCRELEYIAAYVSDITNGALESIGTFCKNLCDFRLVLLDREERITDLPLDNGVRALLRGCTKLRRFALYLRPGGLSDTGLGYIGQYSGIIQYMLLGNVGETDDGLIRFALGCENLRKLELRSCCFSEQALARAIRSMPSLRYVWVQGYKASKTGHDLMLMARRFWNIEFTPPSSENANRMREDGEPCVDSQAQILAYYSLAGKRSDCPRSVVPLYPA

SEQ ID NO: 54409 - protein, 563 aa, Oryza sativa
MAAAANSSASAAGAGGGSAAAAGLKTYFKTPEGRYKLQYEKTHSAAVLHYNHGGKTVSQLTVAYLKEKPAGQGSTPSTPSSSSGMRSAAARLLGSGNGNRTLSFVGGNGVSRAVSGSSRIGGGLGTSGGIGSSQAVANYDGKGTYIIFNTADTLFISDLNSQDKDPIKSIHFSNSNPLCHAFDPEAKEGHDLIIGMGSGDVYSMSLRQQLQDSGRKPVAAQHYNKGDKDGTSTGSRCTSVAWVPEREGIFVVSHSDGNLYVYDKCKDGNTECTFPAIKDPAQLMISHAKSSKSNPIARWHVCQGSINAISFSPDGAYLATVGRDGYLRVFDFSKEQLIFGGKSYYGALLCCTWSSDGKYLLTGGEDDLVQVWSMDDRKIVAWGEGHNSWVSGVSFDSYWSPPNSDGTGENTVYRFGSVGQDTQLLLWGLALDEIAVPLRHPSSGSPTFSSGSPSAHWDNACLPTGVLQPSPRMRDVPKLSPLVAHRVHVDPLSGLVFTNESILTICREGLIKIWVRPDQNENNHQSNSSELVLGNPVSKDRVITTSNKATGSSFKQSSAVVFT

SEQ ID NO: 54410 - protein, 210 aa, Oryza sativa
MTIIPLSPTHFFLEFSCVNHSFSSGFGIFFSAASPTTACRRRPQPTSPIRSPVVVPRPLKSPRTVSTGITAVPPPLKSSRIAGLLRQTALATSSSASASTAAYTEPRRRSSAAERLNFLIASQTFAWSSTGNNLQTFFEELNTFHVGLSSEDAVERLQLSGASRLEKFICLFLIIVYLHSCSEILIFFTSFWNRTRASSSSALCGILCPK

SEQ ID NO: 54411 - protein, 369 aa, Oryza sativa; identical to SEQ ID NO: 35321

SEQ ID NO: 54412 - protein, 217 aa, Oryza sativa; identical to SEQ ID NO: 35655

SEQ ID NO: 54413 - protein, 376 aa, Oryza sativa
MVSGRSANGELDACFRSLMLSISSGRGQAEGGGAMPTLSGWKDLPIELLLRIMSIIGDDRMLVVASGVCTGWRDALGWGLTNLSLSRCQQNMNNLMISLAHKFTKLQVLTLRQNIPQLEDSAVEAVSNYCHDLRELDLSRSFRLSDRSLYALARGCPQLTKLNISGCSNFSDTALTYLTFHCKNFKCLNLCGCGKAATDRALQAIARNCGQLQSLNLGWCEDVTDKGVTSLASGCPDLRALDLCGCVLITDESVIALATGCPHLRSLGLYYCQNITDRAMYSLANGRVKSKRRRWDSVRSSSSKEEDGLANLNISQCTALTPPAVQAVCDSFPALHTCPGRHSLIISGCLSLTSVHCACALHPHRAGRTMVPSHAY

SEQ ID NO: 54414 - protein, 57 aa, Oryza sativa
MKKISVQRRNRPNKRRTIVRLKTRKETKNLKQRFWKDFMMKLRLMIVMAYHQSRPKK

SEQ ID NO: 54415 - protein, 596 aa, Oryza sativa
MGSGASRLLTACTCSRPAPASVDAEPCLDDALGHSFCYAAAATATAHSSSFRHGISGAALSANSSVPVPLYNASAAAGGVAPGYSSAFHTSSSFSSAPLQLSNLSSGPLFLSGPIDRAGQLSGPLDPAVPFSGPLPAKPPKPASSSSRGFSRRFRKPSFGSLRRSVSEKNRPCAVPLRRDDGVQWAHGRAGEDRVHVVVSEDQRWLFVGIYDGFNGPEAPDFLVTNLYRFLLRELRGIFYKEADADNKKLWQFLVDGDDDDSELDFSGSGRFALSLDRLKESRFHMWAHAAADESGREWGSRRLAPAPAVRDHAAVLAALTRALASTEAAYLDMTDQSMGTHPELAVTGACLLVALVRDDNVYVMNLGDSRAIVAQRPDDGDDGCVFGTMRRMEDVGVGLEIETRPGGCAIIGLKPLQLSTDHSTSIEEEVHRIKREHPDDDQCIVNDRVKGRLKVTRAFGAGYLKQAKLNNGLLEMFRNDYIGDTPYISCTPSLCHHKLTARDQFLVLSSDGLYQYLSNEEVVLHVENFMERFPEGDPAQSLIEELLSRAAKKAGMDFYELLDIPQGDRRKYHDDVTVMVISLEGRIWKSSGTYV

SEQ ID NO: 54416 - protein, 311 aa, Oryza sativa; identical to SEQ ID NO: 36753

SEQ ID NO: 54417 - protein, 783 aa, Oryza sativa; identical to SEQ ID NO: 37539

SEQ ID NO: 54418 - protein, 381 aa, Oryza sativa; identical to SEQ ID NO: 29963

SEQ ID NO: 54419 - protein, 104 aa, Oryza sativa
MKLVRFLMKLNNETVTIELKNGTTVHGTITGTMSWRPFFFVVVVLFGGALLGFASGVCVVYVARDLIDWRCGCISMADSVETLGGLCAEAFVFVTMRSKSRVFD

SEQ ID NO: 54420 - protein, 442 aa, Oryza sativa
MARSPCDLRILLVAAAAAFIYIQVRLFSTQSHYADRLAQAEKSENQCTSQLRSLIDQVSSQQEKIVALEEMKIRQDEERVHLKILIQDLEKRSVQTLVNNNVAPVAAVVVMACNRPDYLQRTVESILKYQTSVASKFPLFISQDGINGEVKKKALSYNEITYMQHLDLEPVRTERPGELIAYYKIAKHYKWALDELFIKHNFARVIILEDDMEIAPDFFDYFEAAAKLLDNDKTIMAVSSWNDNGQKQFVYDPKALYRSDFFPGLGWMLTKPTWIELSPKWPKAYWDDWVRLKEVHRDRQFIRPEVCRTYNFGEHGSSMGQFFRQYLEPIKLNDAHIKWNSEDLSYLKEDKFLIQFGKDVASATPLHGSDAALKAHNMDADVRIQYNDQEDFERIARQFGIFEEWKDGIPRTAYKGVVVFRYKSSRRRIYLVGPDSLSQLRV

SEQ ID NO: 54421 - protein, 520 aa, Oryza sativa; identical to SEQ ID NO: 53168

SEQ ID NO: 54422 - protein, 498 aa, Oryza sativa
MRVAAAAAAAAIRPTAALLLLFPPHRRTTSLRRSSLPFARPRRHSTTTTTAESHPKPNESNAARRRRARDSPEGLLKAKLDMCSRDNDLPTALALYEAAISPDSLIPLSLGHYNCLLYLCANAAAADSSSPDAAQRGFDIFSRMEADGVQPNEATLTILARLAAARRDPAMAFSIVRRMATAGTAPHLRSYGPALFAYCDAGDADGATEVEAHMDASGVVPEEAELAALLRVNTARGRPDQVYRLLHRARVLLRQVADATAQLLESWFASHAASEAGLDHWDATKVKQGLRNGGGGWHGQGWLGKGQWTVARTDMDKDGTCHRCGEKLVCIDIDPSETHSFAESVAQIAINRDANFVKFQKWLECHGPFDAVIDAANVGLYNRNSFSFYEVNRVVNGIQRITKSKKLPLIILHKNRVNGGPAKLPQNQKLLESWQRAGALYATPPGSNDDWYWLYAAVIYRSLLVTNDEMRDHLFQLLGTSFFPRWKENHQVCLSLQK

SEQ ID NO: 54423 - protein, 549 aa, Oryza sativa
MGSGSSKAGASSASSSSSASASASASGGDEASKGNGKGQRRGRGRGRGLLQRLPSSSSSCFRGHGTPSRDDASSASSPPPPPRPPRRPFESSKGEENGSLPSIAQMDKSEEDAPTIPKSHPGEGATLPSSHINRDQDVDVLQNATAVNNRVEVNQSPNHSDSSRPRFGVNFGLSRAVSLGSSVACSILSSDLSTSANPDGGHGNVDNSSDANISQQGGASTAGIDSTLDMLRDSVTAQARAAHQARRNLLESDNANLRYSNRRMGPQEPFEGSVRFSRTLSVGRLRDRVLRRTPFSDGLFTPSLLYDRAIWPSGNASARQNSAIMQRTNSERNSELQLDSSTDSATLREANNRDLLERRSAFLERRRIRSQVRALQRLGSRYENLSGLSGHERSCILSGQHRTGNCNCRTSSRPGNSDEETNTRASISRIVMLAEALFEVLDEIHQQSAALSSRPSFSSIGSVPAPKEVVERLPVKVYRRSLKHQTEEAAQCYICLVEYAEGDCVRILPCNHEFHLTCVDKWLKEIHRVCPLCRGDVCRSNASGIGKTT

SEQ ID NO: 54424 - protein, 264 aa, Oryza sativa
MIEIWRAAGMNLDGVEFLWSSEEINKRANEYWPLVMDIARKNNVKRIMRCCQIMGRNDSDELTAAQIFYPCMQCADIFFLKADICQLGMDQRKVNMLAREYCDDIKRRNKPIILSHHMLPGFKEGQEKMSKSDPSSAIFMEDDEAQVNLKIKQAFCPPNIVDGNPCLEYIKYIVFPWFETFEVVRKEENGGNKTFANMNELIADYESGALHPADVKPALAKAINQILQPIRDHFKNNSEAKVLLNTVKNYKVKTEDTSSSPQAS

SEQ ID NO: 54425 - protein, 313 aa, Oryza sativa
MLSSRGRGDAIAISGHQMRAPNPTPPRDSAMARRRKGSSYRRRRRRRRRAPAACGDNRIDDLTDDLLLIILRRLDTRSALATAALSRRWSGLARAGLEALDFMVGDILPPRYHRCIQLHESASGVFDGADELRTIVASIRRHERLAMRNMVASINNFLDADDGFAHGDGGGGAPRRRISRLRVEFIATHYHDCINRLVAKAVDTWGVEDLEVLGRTTYWRHHFQDAHIFRRHGLCNDPHRSRLRSLKLVDCVIPPLQGFQALTKLVLQDLRDSTPAAAYEAVCSAHAYSCKRCTSSPAPASAAVVFSLMPPGQ

SEQ ID NO: 54426 - protein, 436 aa, Oryza sativa
MEGSPATRLPEADSLPDGFVESSAADQAPPPPADAGDPASRSLGLDQADATVGGGGGDETLGAPPSTLASVAQDTLDAYSAADALQSLTVGGSAAEPERALGEPAVDAGAVPVVADAKESSKESSVVEQVESMADQKVVIAEGSGEQKRKVVKKSKVEKDRELFELAQAYHKVVAERDAAIAVKEKLESLCREFQRQNKMLKEECRRVSTEGQNMRMELSDKFNNAIKDVSVKLDEQKNECIAQLEENNLLRSKLKDLADQYNITQQKYAHQLKEKMLELELADLKMQQHQEKTAQEQTQMQLYADQVSQLMSTEKNLRLQLAADGERFQQFQDALTKSNEVFETYKKEMEKMVKLIKDLKKDNEFMKSKCENSDVALVKLIEERELMKKQVDKFKNQKEKLESLCRSLQAERKQSPSGGTPDATSNETNLATIES

SEQ ID NO: 54427 - protein, 401 aa, Oryza sativa
MAKPANSIGRSTPRSNEGMRLIFSAVVGVMLGYLFGVSFPTVNITKLHFPSSIISYIEDRNSGITTQTLLNHAWASANRHNKNNSDSTSEEVPKIYVPTNPKGAERLPPGIVVSETDLFPRRLWGDPSEDLSSEPRYLVTFTVGITQKANIDAAVKKFSDKFTIMLFHYDGRTTEWDEFEWSKRAIHVSVRKQTKWWYAKRFLHPDVVARYDYIFIWDEDLGVEHFNAEKYIELVRKHGLDISQPGLQPDKGLTWQMTKRRGDQEVHKVTEERPGWCTDPHLPPCAAFVEIMATVFSRDAWRCVWHMIQNDLVHGWGLDFALRKCVEPAHEKIGVVDAQWIVHQAVPSLGNQGNAENGKAPWEGVRARCRKEWEIFQTRLADAEKAYYLSQGITPPNSTLV

SEQ ID NO: 54428 - protein, 335 aa, Oryza sativa
MAAAAESKAGKSPEELLCAAAESGDAEAITGLLAEGADPTHFDASGLTPLMHAATGGHAAVVQLLLDAGAPWNALSPTGISAGDLASDSATFDLLLDHALRSELVLGTVARRQAGPADSPAESYLESRVSFSEERVMDADSKAVMMEWERPLMEAHARAVCSGGKVLNVGFGMGLVDTAIQRYEPEEHTIVEAHPEVYARMLKLGWGEKKNVKVVFGRWQDVLPQLGSYDGIFFDTYGEYYEDMREFHQHLPKLLKPGGIYSYFNGLCGDNAFFHVVYCQLVALELANLGYSTQFIPLPVKDCLSEEIWNGVKQKYWQLDTYHLPVCQAESEPEQ

SEQ ID NO: 54429 - protein, 392 aa, Oryza sativa; identical to SEQ ID NO: 45636

SEQ ID NO: 54430 - protein, 372 aa, Oryza sativa
MPEDVEMNDSQPQPAAAPPPAASTLQHLKEIASVIEAGSLTKEVRRISRAVRLTVALRRRLAARDVAAFLAFALPHSSEAFARLSSLLPKEDGSEMDVDLAAPAAQVSIKHGLPEIEIYCYLLVLIFLIDNKKYDEAKACASASITRLKNLNRRTVDVLASRVFTYYSYVHELTSSLAEIRGTLLALHRMATLHRDELGQETLLNLLLRNYLHYNLYDQAEKLRSKAPRFEAHSNQQFCRYLFYLGKIRTIQLEYTDAKESLLQAARKAPTTARGFRVQCNKWAIIVRLLLGEIPERTVFMQKGMKAALAPYFELTNAVRVGDLELFRAVAEKFASTFSADRTRNLIVRLRPQCHSDWIAQHKHFILTDLPC

SEQ ID NO: 54431 - protein, 598 aa, Oryza sativa
MASAFGSTSACGIKITPTAFATKKHLCLVPPPVVSLPQKNRPQRKCNFRVNAAKELYFNKDGLAIKKLQNGVNKLADLVGVTLGPKGRNVVLESKYGSPKIVNDGVTVAKEVELEDPVENIGAKLVRQAAAKTNDLAGDGTTTSVVLAQGMITEGVKVVAAGANPVQITRGIEKTAKALVSELQKMSKEVEDSELADVAAVSAGNNYEIGNMIAEAMNKVGRQGVVTLEEGKSAENNLYVVEGMQFDRGYISPYFVTDSEKMSVEYENCKLLLVDKKINNARDLITILEDAIRGGYPILIVTEDIEQEALATLVVNRLRGALKIAAIKAPGFGERKSQYLDDIATLTGGTVIREEVGLSLDKADRDVLGTAAKVVVTKDSTTIVGDGTTQDEVNKRVTQIKNQIEVAEQEYEKEKLNERIAKLSGGVAVIQVGAQTETELKEKKLRVEDALNATKAAVEEGIVVGGGCTLLRLASKVDAIIETLENDEQKVGAEIVRKSLSYPLKLIAKNAGVNGSVVTEKVLANDNFRYGYNAATGKYEDLMAAGIIDPTKVVRCCLEHAASVAKTFITSDAVVVDIKEPEKAAAAGNPMGGSGFGF

SEQ ID NO: 54432 - protein, 569 aa, Oryza sativa
MAGGGTSIRKYVGALKDTTTVSIAKVNSDYKDLDIAIVKATNHVENLPKEKYIRDIFYHLSAGRARADVAYCIRALGRRLSKTRNWAVALKTLIVIHRALREVDPTFRDELISYGRSSTHMLHLSYFKDDSSAEAWDYSAWVRNYALYLEERLESFRVLKYDVEKDPPRTRDLDTVGLLEQLPALQQLLFRLLGCQPQGSSSYNNIIQHALSMVALESVRIHTAINDGILNLVDKFFEMQRDDALRALDLFKRAINQAGQLSEFYEMCKTIHIGRGERFLKIELPPTSFLQAMEEYVRDAPLASINQRNQAVLAIEYKRKPEDEESSSSAPLPPPPVSTSESEPEPEPEPVKEVSPVHEPTDLLGMNEPTPDVSKIDQKNSLALAIVQPDNTPKAAAPTTENVATSWELALVAAPSSNGNAATSNKLAGGLDLLTLDSLYNEAHRQAQQNASYNPWEAAAPASSGPMMQQPMQNPFYASNAIAPPLNVQMAAMAQQQQHMFMLQQQQQQYDQQQQQMMMMMGRQPYDQQQGSSSNPFASPYMSAGVHPYGPGMQLHAGNSYTYSGTGMM

SEQ ID NO: 54433 - protein, 574 aa, Oryza sativa
MGKSPAKWIKSVLFGKKSSRSGSTKAKDLSKGSNNKGYAAAGKDAGFESSPVISEPVLVTPHNNEAVQEVGRGENSSLQGEVVVRDVSQDLEKQNTVVSDASNDPERLREEQAAVKAQAAFRGYLARRAFRALKGIIRLQALIRGHLVRRQAVATLRATWLIVKFQALVRGRNVRLSTNTIQVNWKLVQQQSGSGKRDAWKEKLSSNAFARKLLASPILVEALHFQYDERDPNSAFNWLERWTIGRVWRPISHPKRAAVTDAKPHTRKASYAMETESGKLKRNSRRSSAAPVESSQTNIAMETEKSRRNPRKFTSSTADSVPESQLTELEKVKRNLRKVTNSMAEASKVSTPATEIPERQEVQCEKPQRTAEEVPNYPEIQEPQNGNLLENDKTDILVPDLQPEPEVPSYQVETEEKVAELTVADPTVETMPLQDIHNEENALVNDMEQRSKEEPLSTESLKSSKRRSSFSTKTEYPENGSKNSPAVPSYMAATQSAKAKLRGQNSPRLSSDSAEKNGFTRRHSLPSSNGKLNSHSPRTQRPTHAGGKEGVKADKSMLSSRDASERPAKAEWKR

SEQ ID NO: 54434 - protein, 340 aa, Oryza sativa
MGGAAVSSLLATPTPTSRPRPVSTTTAPFSVNLSTAAARAPRLLLLSRRPRPRPAAAVLGVSDDTGVKMAGSDIVGKNDLLIVGPGVLGRLVAEKWQEGHPGCKVFGQTASTDHHNELSNIGIIPSLKGSTFPQKVPYVIFCAPPSRSDDYPGDVRVAASNWTGEGSFVFTSSTALYDCSDNELCNEDCPSVPIGRSPRTDVLLKAENVVLEAGGCVLRLAGLYKIDRGAHFFWLRKGTLDTRPDHIINQIHYEDAAPLAIAIMKKGHRGRIFLGCDNKPLSRQEIMDSVNRSGKFDTKFQGFTGTDGPLGKKMENSRTRSEIGWEPKYPSFTEFLGLDS

SEQ ID NO: 54435 - protein, 305 aa, Oryza sativa
MALPCSYGSHCAALPFPAVVSRAASSPPPRSRGRRPSLPPAGCFHAAPRDAALVSGSAAGGVSRRRCELFDLHQHIVPFAESWAWQQSIVTRRKGLVGTDEDHSDTLIALQHPPVYTLGTDSTEDYLHFDVKDAPFEVHRIDRGGEVTYHGPGQLVMYPIINLRYHQMDLHWYFRSLEEVIIRALQSAFSIKASRVEGLTGVWVGDKKVAAIGIHVSRWIAYHGLALNVTTDLTPFQLIVPCGIKDRGVGSIKEILQIASDGKEIDETALIDKAYRTLLKEFAEVFQLSLYHNPNWDLQESKNFS

SEQ ID NO: 54436 - protein, 340 aa, Oryza sativa; identical to SEQ ID NO: 54434

SEQ ID NO: 54437 - protein, 495 aa, Oryza sativa
MNCCSSEAVLSSKVALLNSLFCTIVLPKENCSNKMNCTKGGGFPLLFCAVICLMAQQGACNVVLIANNTTLSFDDVEATFTPEVKDSGVNGAIYAVEPLDACSPLRKKAANGPVSPFALVIRGGCQFDDKVRNAQNAGFKAVIVYDDEDSGVLVSMAGSSSGIYIYAVFLSKASGEVLKKYSGQSDVEVWILPVYENSAWSIMAISFTSLLAMAAVLATCFFVRRHQIRRDRGRIPVTREFHGMSSQLVKAMPSLIFTKVQEDNSTSSSCAICLEDYSFGEKLRVLPCRHKFHATCVDMWLTSWKTFCPVCKRDASAGTSKPPASESTPLLSSVIHLSAESTALSSFRSTVAVSPPRPIRRHPSSQSTSRAYSISSAPRNYNLQRYYTNSPYISTSRSNVDLANMSSQWSHTPHQASMHSLRSGHLSLPINIRYTIPHVSRSDYGSASLGLSHDSCSHHGSPSYYHSSLGQQRSYLMHRTESGPSLSTMVLQSPQ

SEQ ID NO: 54438 - protein, 37 aa, Oryza sativa
MVAASSPMLHQAVQQLRQHPHLRQIWREGRRWGPPLR

SEQ ID NO: 54439 - protein, 523 aa, Oryza sativa
MLMMLGAASQWILAAAAAAAVAALLWLAVSTLEWAWWTPRRLERALRAQGIRGNRYRLFTGDVPENVRLNREARKKPLPLGCHDIIPRVLPMFSKAVEEHGKPSFTWFGPTPRVMISDPESIREVMSNKFGHYGKPKPTRLGKLLASGVVSYEGEKWAKHRRILNPAFHHEKIKRMLPVFSNCCTEMVTRWENSMSIEGMSEVDVWPEFQNLTGDVISKTAFGSSYEEGRRIFQLQAESAERIIQAFRTIFIPGYWFLPTKNNRRLREIEREVSKLLRGIIGKRERAIKNGETSNGDLLGLLVESNMRESNGKAELGMTTDEIIEECKLFYFAGMETTSVLLTWTLIVLSMHPEWQERAREEVLHHFGRTTPDYDSLSRLKIVTMILYEVLRLYPPVVFLTRRTYKEMELGGIKYPAEVTLMLPILFIHHDPDIWGKDAGEFNPGRFADGISNATKYQTSFFPFGWGPRICIGQNFALLEAKMAICTILQRFSFELSPSYIHAPFTVITLHPQHGAQIKLKKI

SEQ ID NO: 54440 - protein, 243 aa, Oryza sativa
MASLFKDPTKLSAYRDRRFTGTQEEYEAALQASVTVYVGNMSFYTTEEQAYELFSRAGEIRKIIMGLDKNSKTPCGFCFILYYSREDAEDAVKYISGTMLDDRPIRVDFDWGFEEGRQWGRGRSGGQVRDEYRTDYDPGRGGYGKMVQKELEAQRELVDYGGAFQPNAPPQYDRGDRKRGYGDSYRNDRDYQRKRYRNDERSSQRAPDSEFKRDAIDSEKNPRFREKGDSDEEDDDYDKRRRR

SEQ ID NO: 54441 - protein, 384 aa, Oryza sativa
MQIFVKTLTGKTITLEVESSDTIDNVKAKIQDKEGIPPDQQRLIFAGKQLEDGRTLADYNIQKESTLHLVLRLRGGMQIFVKTLTGKTITLEVESSDTIDNVKAKIQDKEGIPPDQQRLIFAGKQLEDGRTLADYNIQKESTLHLVLRLRGGMQIFVKTLTGKTITLEVESSDTIDNVKAKIQDKEGIPPDQQRLIFAGKQLEDGRTLADYNIQKESTLHLVLRLRGGMQIFVKTLTGRPSPSRWSLLIPSTMSRPRSRTRRAFPRTSSASSLLASSWRMAGPLLTTTSRRSPPSTLCSAFVVVCRSLSRPSQARPSPWRLRARTPSTTSRPRSRTRRASPQTSSVSSSPASSSRMAAPSPTTTSRRSLPSTWCFVSVVVCRSS

SEQ ID NO: 54442 - protein, 646 aa, Oryza sativa
MDKASCSLGFGDSINSLDTSRHWSTVQHTSGLKATTIDYSTYSSFSIASSKTLKRKRSAMAGPEGTGNPLLTLGLGHSPSSSDNSKVSSATAYAMSPSSLKEADEESSADLGLNFELCLGNDMVHCQKKSPVGAENSPLTNSHKLDLQLSLSTGSPESAVTNTNMVSPIIHGGLEIPVTNCSPAIIGEGSVPCTWVFEKSVISSSYASEATYTFPFSKVPKTGDAAMSSPVISSTLVTSMKSPVACTSGSINPQQRNSITKNCQFPGCVKGARGASGHCIAHGGGRRCQKPGCQKGAEGRTIYCKAHGGGRRCQFLGCTKSAEGRTDHCIAHGGGRRCSHDGCSRAARGKSGLCIRHGGGKRCQKENCIRSAEGHSGFCISHGGGRRCQFPECTKGAQGSTKFCKAHGGGKRCTFSGCNKGAEGSTLFCKGHGGGKRCLFQGGGVCPKSVHGGTQYCVAHGGGKRCAISGCTKSARGRTEYCVRHGGGKRCKFEGCAKSAQGSTDFCKAHGGGKRCSWGQVDLNFGVGAPQCDKFARSKTGLCSAHCALVQDHCVRGGTLGAATFQFATDAKFDEMEVTPVKGDPHAQASSDDQSHLGGAHPPAVPAITSDRFSEGRVHGGGLLALLSRGGNHANAGNSKNGALLP

SEQ ID NO: 54443 - protein, 576 aa, Oryza sativa
MAGDITCGSLLQKLQLIWDEVGESDEDRDKVLYQLDQECLDVYKRKVDQATDSRDLLIQALDDSKIELARLLSALGEKAIARTPEKTSGTIKQQLAAIAPTLEKLNKQKNERVREFVNVQSQIDQICGEIAGTTEVGEKVATPQVNEDDLTLERLEEFRSQLQELEKEKSNRLEKVLDYVSMIHNLCTVLGMDFLSTVTEVHPSLDDSIGDNCKSISNDTLSKLDKTVATLNEDKKSRLSKLQELAGQLYDLWDLMDAPMQERSMFDHVTCNRSASVDKVTAPGALALDLIEQAEVEVQRLDQLKYSKMKEIAFKKQTELEDIYAGAHMVIDTAAAHEKILALIEAGNIEPSELIADMESQISKAKEEALSRKEILDKVERWMSACEEESWLEDYNRDDNRYNSSRGAHLNLKRAEKARILVNKIPALVETLVAKTRAWEESRGLSFMYDGVPLLAMLDEYVMLRQEREEDKKRMREQKRYIEQQLNTDHEGPFGSRVSPNRPVSAKKVPGAKSNGSANGTPPNRRLSVSGHQNGRSGGKDGKRDSAKTASPGNVAAAKEDASSHISGTDPVPSTP

SEQ ID NO: 54444 - protein, 226 aa, Oryza sativa
MAQFRSAPVESEAEPGADGPVDEANAVEEEKSGKGEDGIEEAADTVDSVKDSAKPEGMDAKEEAVEQGGGAAADKAKDIPVTSNGKTDAGGNEVAEMKVEKLENGDGHLKADGDSNGDNKGADGEKQLMLASAGEDVEDPVLSKLASNSFMFDYSCGGDDSGTEEEQAAFMKELERFYREKLMEFKPPKFYGEGLNCLKLWRQVTGLGGYDQVMCTACLLTSCINR

SEQ ID NO: 54445 - protein, 242 aa, Oryza sativa; identical to SEQ ID NO: 51889

SEQ ID NO: 54446 - protein, 423 aa, Oryza sativa; identical to SEQ ID NO: 35311

SEQ ID NO: 54447 - protein, 426 aa, Oryza sativa
MGEFARRVYQELNYVQEGQNARRFKKLYADKQDVLVPDIFWDYTSAKVLTMEWIEGVELNQQAAIEKQGLKVLDLVNIGIQCSLRQLLEYGYFHADPHPGNILATPEGKLAFLDFGMMSETPEDARVAIIGHVVHMVNRDYEAMARDYYALDFLEPDVDVSPIVPALKSFFDDALNSTVSELNFKTIVDGLGAVLYQYPFNVPAYYALILRSLTVLEGLALYADPNFKVLAASYPYFAKRLLTDPNPYLRDALIELLFKDGKFRWNRLENLLVQGSQDREFAAKDALQPVLKLLLGPDGEELRVLVVKEAVRVTEAITFGTLIDSYNAAPEFLKPLISSGNPAGPFKISDTEREQMIELRDRVFRIWGLLRSSDGFDPTILQPIVQVLQEPEARVLGSRVAGGVTQRLAARLLQQLLRTPPAPGSP

SEQ ID NO: 54448 - protein, 421 aa, Oryza sativa
MDSIGINRAPLGSSSSAAAVTARRGIALRPARRSVASTNRVGVATIGFGDASGLRACSEKVRRFDSVRSTTARAQNGNAGRSMTEERGCTMSDTEMPFKYSSGKAFPLGVSQVEGGLNFALFSQHASSVILCLKLPGRGTEDEKGADVVEFVLDQQKNKTGDIWHVIVEGLPASGVLYGYRVGGPQGWDQGHRFDSSTVLLDPYAKLVSGRKYFGVAEEKSSQHFGTYDFDSSPFDWGDDYRLPNLPEADLVIYEMNVRAFTADESSGLDSTSRGSYLGLIDKIPHLLELGVNAVELLPVFEYDELEFKRYPNPRDHMVNTWGYSTINFFAPMSRYASAGGGPVAASKELKQMVKELHKAGIEVILDVVYNHTNEADDAHPYMTSFRGIDNKVYYMLDLNKNAELLNFSGCGKTMVPVLVY

SEQ ID NO: 54449 - protein, 574 aa, Oryza sativa
MGKSPAKWIKSVLFGKKSSRSGSTKAKDLSKGSNNKGYAAAGKDAGFESSPVISEPVLVTPHNNEAVQEVGRGENSSLQGEVVVRDVSQDLEKQNTVVSDASNDPERLREEQAAVKAQAAFRGYLARRAFRALKGIIRLQALIRGHLVRRQAVATLRATWLIVKFQALVRGRNVRLSTNTIQVNWKLVQQQSGSGKRDAWKEKLSSNAFARKLFASPILVEALHFQYDERDTNSAFNWLERWTIGRVWRPISHPKRAAVTDAKPHTRKASYAMETESGKLKRNSRRSSAAPVESSQTNIAMETEKSRRNPRKFTSSTADSVPESQLTELEKVKRNLRKVTNSMAEASKVSTPATEIPERQEVQCEKPQRTAEEVPNYPEIQEPQNGNLLENAKTDILVPDLQPEPEVPSYQVETEEKVAELTVADPTVETMPLQDIHNEENALVNDMEQRSKEEPLSTESLKSSKRRSSFSTKTEYPENGSKNSPAVPSYMAATQSAKAKLRGQNSPRLSSDSAEKNGFTRRHSLPSSNGKLNSHSPRTQRPTHAGGKEGVKADKSMLSSRDASERPAKAEWKR

SEQ ID NO: 54450 - protein, 571 aa, Oryza sativa
MAGLKKMEEVTAAAAAVAASSTAEKRAAAVVVPDAALTMNGAAGAEEKTAAAAAAPEDLPAPAALSGWPRRVGLYLFVMNIRSVFKLDELGSEVLRIAVPASLALAADPLASLVDTAFIGRLGSVEIAAVGVSIAIFNQVSKVCIYPLVSVTTSFVAEEDAIISKCIEENSSQDLEKASPVDSETNNLPVSGPDKVECVNSCIPTECTNPSDQGCKRKYIPSVTSAVIVGSFLGLLQAVFLVFSAKFVLNIMGVKNDSPMLRPAVRYLTIRSLGAPAVLLSLAMQGVFRGFKDTKTPLYATVVGDAANIILDPILMFVCHMGVTGAAVAHVISQYLITMILLCRLIRQVDVIPPSLKSLKFGRFLGCGFLLLARVVAVTFCVTLASSLAARHGPTIMAAFQICCQLWLATSLLADGLAVAGQAVLASAFAKNDKGKVVVATSRVLQLSIVLGMGLTVVLGVGMKFGAGIFTKDIDVIDVIHKGIPFVAGTQTINSLAFVFDGINFGASDYTYSAYSMVGVAAISIPCLVYLSAHNGFIGIWIALTIYMSLRTIASTWRMGAARGPWVFLRK

SEQ ID NO: 54451 - protein, 520 aa, Oryza sativa
MKPAGGRSKDGGGGGAALLGGGGVTCFDVKSFVASLALLTLIMALWQLHPYQPLVLLPAALSSSPCPLPPAHPPLVLPFPSSPPPLPPTRLTPPRSQPPPPPRGWRRRRGRPCTRQRERDPNKRELRPYGTAAALFVQMGAYRGGPRTFAVVGLASKPAHVFSNPYFKCEWLPNAPAGAPPVRTKAYKMLPDWGYGRVYTVVVVNCTFPSNPNADNLGGKLLVHAYYSTASRRYERFVALEEAPGSYDDARFRPPFAYDYLYCGSSLYGNLSSARMREWLAYHARFFGPRSHFVLHDAGGVTPEVRAVLDPWVSAGRVTVQDIRAQEDYDGYYYNQFLVVNDCLHRYRHAANWTFFFDVDEYIYLPDGRALEDVLAQLQPYTQFTIEQNPMSSKLCIDDPTEDYSREWGFEKLVFRNSITGVRRDRKYAIQARNAYSTGVHMSQNVYGRTTHKTESLIRYYHYHNSINVMGEPCRKFVPKPANGSKVMFEGIPYVYDDNMKRLAGEIRRFEKQTIGDVHT

SEQ ID NO: 54452 - protein, 524 aa, Oryza sativa
MVATVRCEEIGNEKIASFTADEEWQQFEEAVQHDYVPGFGKKISNLLDRCLSEYDMEAIYFDEGVRTSKRHQLESKLLQLVNPAYQNILDHLRTRTLEVFKESFDKSLEKEGFAVAARDCTKVFLEKFDKGSEDAAIQQVKWDPSKIKDKLKRDIEAHVASVRAKKLSELCSKYEGQLTKALAEPVEALLDSASEETWPAIRKLLQRETKSAVSGFESAMASFELDEVTQKELLSKLESHGKSVVESKAKEEAARVLIRMKDRFSTLFSRDADSMPRVWTGKEDIKAITKTARSASMKLLSTMAAIRLDEDGDNIENTLSLALVDTARPGTTDRSIQSFDPLASSSWERVPEEKTLITPVQCKSLWRQFKAETEYTVTQAIAAQEANKRNNNWLPPPWALAAMAILGFNEFMTLLKNPLYLGVIFVVFLVGKAMWVQLDIAKEFQNGFLPAVLSLSTKFVPTIMNILKRLADEGQRPAAPERQREMELQPKSTRNGSHSNVTSAGSSSITSSESGPEYSSPIAH

SEQ ID NO: 54453 - protein, 366 aa, Oryza sativa
MPPKKAAPSKADLAKKQKVVEDKTFGLKNKNKSKNVQKYVQSLHQAVQPKPDPTKAAAKKKKEEEKAREKELNDLFKVAVSQPKVPVGVDPKSIVCEFFKVGQCQKGFKCKFSHDLNVQRKGEKIDIYTDKRDAETMEDWDQETLEKVVASKGAEYQQNKPTDIVCKYFLDAVEKKQYGWFWVCPNGGKDCHYRHALPPGYVLKSQMKALLEEESEKIAIEDEIEDQRKKVKTTTPMTTDLFMEWKRKKAEEREAGLAALRAERAKNDRMSGRELFMADSSVFVDDAEAYDVYERQEESEANEEPSNKNQDEGPSSSTSNGKEVEESDDEDINIDDDLDIDELNELEASLSRTSIQIREPGEGTSS

SEQ ID NO: 54454 - protein, 138 aa, Oryza sativa
MGDLGGAWHEAAAAEEEEAQAPGGGVGPEPDHLVVMVHGIVGSAADWKFGAEQFEKLLSDKVIVHRSNRNMYKLTLDGVDVMGERLAQEKGRLLKKPTKDHRSERSLLLHILLEDWLQDMLLEDSIGHLNKHPKVLRI

SEQ ID NO: 54455 - protein, 558 aa, Oryza sativa
MAEETKINAINHHHLIDISPELGGATAIDGPKEMKELGIVDGAVEMKELGVAAAVHGAGEMKELGGTASIDGAADKKELGGAVAGAGGAAETKWLRKLTSSSVNTAVLRDLIARTPMLWYLGERSGTILRPRSRRAGVDALHAVRAVAIGPFHRRDHWLPFPDDAKLPFLRYLQDQCGLDVEHYVAALADESDRLRDEFADDDVGDDVAAEILGDEEKFLQMVLLDSCFILVVSMMLSKVCTDGDKASCVSRAASISREYFILHMAVSQHAEDIKLDMLVLENQVPFAAVKLLAASCSKLKLLRPVEELVLGCFDDILPKRASPAAGDTEPFQHVLHLFHWSRVPTSKYCILSTPRKLLKIKKESERLFPSSMELCRSAVWFRSAAASCGDLDMWFWGRTASPVAVMTIPCLDVHEYSATVLHNMIAFEKHFHWAHGACVTAHVARMEGLVRCPQDAAFLRRRGVLSSMRKTDAELVAFFRELGEETVGARLPDEYAEMVDAVACHRSRKVSWWCGGFVLHFFPSPWVVVSLVAAAAVIVVPSLLQTVYTILSYVKTT

SEQ ID NO: 54456 - protein, 52 aa, Oryza sativa
MLTNGVAAAAIITVTDLSSQVGFMYLLTRSAVKIHIILLSLFLPGIAAWFVI

SEQ ID NO: 54457 - protein, 579 aa, Oryza sativa
MSFDEHHLRIENARLREEIDRISAIAAKYVGKPMVPFPVLSNPMAAAASRAPLDLPVAPYGVPGDMFGGGGAGELLRGVQSEVDKPMIVELAVAAMEELVRMAQLDEPLWSVAPPLDATAAAMETLSEEEYARMFPRGLGPKQYGLRSEASRDSAVVIMTHANLVEILMDANQYAAVFSNIVSRAITLEVLSTGVAGNYNGALQVMSVEFQVPSPLVPTRESYFVRYCKQNADGTWAVVDVSLDSLRPSPVLKCRRRPSGCLIQEMPNGYSKVTWVEHVEVDDRSVHNIYKLLVNSGLAFGARRWVGTLDRQCERLASVMASNIPTSDIGVITSSEGRKSMLKLAERMVVSFCGGVTASVAHQWTTLSGSGAEDVRVMTRKSVDDPGRPPGIVLNAATSFWLPVPPKRVFDFLRDESSRSEWDILSNGGIVQEMAHIANGRDQGNCVSLLRVNSSNSNQSNMLILQESCTDASGSYVIYAPVDVVAMNVVLNGGDPDYVALLPSGFAILPDGPAHDGGDGDGGVGVGSGGSLLTVAFQILVDSVPTAKLSLGSVATVNSLIACTVERIKAAVSGESNPQ

SEQ ID NO: 54458 - protein, 342 aa, Oryza sativa
MAKQAYATSSLVIGYALCSSLLAIINKYAITKFSYPGLLTALQYLTSVAGVWTLGKLGLLYHDPFNLQTAKKFAPAALVFYLAIFTNTHLLKHANVDTFIVFRSLTPLLVAIADTAFRKQPCPSKLTFVSLVTILGGAVGYVMTDSGFSLTAYSWAVAYLVTITTEMVYIKHMVTKLGLNTWGFVLYNNLLSLIIAPVFWFLTGEHLSVFRAIESRGQSWFELDAFVAVSLSCVFGLLISFFGFAARKAISATAFTVTGVVNKFLTVAINVMIWDKHASSFGLVCLLFTLAGGVLYQQSVTLKGNSSVQREAVAKQGKADNDTAELDEEKQSLVSSPKDSNV

SEQ ID NO: 54459 - protein, 457 aa, Oryza sativa
MIRVVSPPPPSTVQLRGGGGTPGPSSSSAVCRFWGSRRGSRVAAASSWGWGRSRRRRRAAISCCSAEEGEGPRVATPSAPQAPSEGSIQLYSQIERVITEAAKQSREGWGSTGDWTEIEGAWVLKPKSQEPSFVVHFVGGIFVGAAPQITYRFFLERLADKGALVIATPYASGFDHFFIADEVQFKFDRCLRNMVEPVNDLPTFGVGHSLGSVIHLLIGSRYAVQRSGNILMAFNNKEASLAVPLFSPVIVPMAQSFGPIFSQLTSYPTLRFGAEAAIKQLENLSPPVVKQLLPLVQQLPPLYMDLVKGREEFVPKPEETRRLVKSYYGISRNLLIKFKDDQIDETSILAQVLSSESAISSLLDMSIRSLPGDHGLPLQQVLPDVPPAMADAVNRGGELLTNLATGTPWEAVAKEVGSTLGADSGVLRAQISKDVNTLVDVIVSWIESNSGPRLLRS

SEQ ID NO: 54460 - protein, 436 aa, Oryza sativa
MPPRIRRAPARRAAPEEVPDRVSALPDEALHAVLSLLPAHDAVRTCVLARRWRHLWEHAPALRVTDVEGWNPRLRGDGLGRFIRFVDGLFVSRRRRDAPLELCDLDFDFPEDKGKDWHVNRWIMLALLRHHARVLRISLPAYITLPDVPLISQRLTRLELDGVLGNDNILDFSCCPALIALKMKCCRINAEKMSSPSVKILSLASCEFYPATRTQMSFPSVVSLELDGCSGSVPFLESMPSLVAAIVIFDDDYADRCDNSVLGDCGDDSCVDCCNYSDRSKCVCLNGLLEATHLELSAEPAMYVFRRDLNLLLACHTFAKLKTLALGEWCMTHDLSALIRFLQQSPILEKLTIKIPEEPKCSMDAGQQKIPEEPFVSNHLKIVEIKCKGKEVMWVCKFLKTLGTFGIPLEKINIKLTSEHCRSECFNFVCTGFSCS

SEQ ID NO: 54461 - protein, 642 aa, Oryza sativa
MDYISPDRSLEGACGDPGPLFGDHDGSLLEHMGFHGDPQHVSPQLNEGLLVDSTDQISYLAADSPSFMNDQIPCNTMKSASTSPASPLKQADDHHVHIDSDMENDAAEQNLHDSYSEAQTTSLGYGIHRRTEVADAAQPTELHESNGNNDTSNFQEETTQSDTYLGDAMLNENGSRDYQLNNSGADDDEIPNSPALEMEDVDTRALHETSHDEKYEAEDDQMNGRNSSPCDEHDEDNCNSVIEPSYLDVMEHENPGTKNGMLTPSNQWDSPPESSARLEKGTPSPDRMVSLPVGRSPRTHSPKELDSPRPENEVGKLATSQNSPVRRRSRSPGKHETNRRRASSRELSPHGRQNSPSPPEKKARREHRHGDGSPRRRSVSPRRRALPKRRDSPRRDSPSRRRDSPRRDSPSRRRDSPRRDSPSRRRDSPRKDSPLRRRDSPRRDSPSRRRDSPRKDSPSRRRDSPRRDSPSRRRDSPRRDSPLRRRDSPRRASPSRRRDSPRRDSPSRRRDSPRRSSPSRRRDSPRRDSPSRRRDSPRRRHRSKSRSPSRKTDGSRHRREHGRSRSRSPHSRSHHRRSPRRHSPRRRSSPSSHRHHSPRRPWSPPANRKTGLGKPGRNLFVAGLVMPPLSEIWKRNSLSMGV

SEQ ID NO: 54462 - protein, 443 aa, Oryza sativa; identical to SEQ ID NO: 37025

SEQ ID NO: 54463 - protein, 349 aa, Oryza sativa
MDPGRVVFDSGVARRACPGGAQMLLFGGGGSANSGGFFRGVPAAVLGMDESRSSSSAAGAGAKRPFFTTHEELLEEEYYDEQAPEKKRRLTAEQVQMLERSFEEENKLEPERKTELARRLGMAPRQVAVWFQNRRARWKTKQLEHDFDRLKAAYDALAADHHALLSDNDRLRAQVISLTEKLQDKETSPSSATITTAAQEVDQPDEHTEAASTTGFATVDGALAAPPPGHQQPPHKDDLVSSGGTNDDGDGGAAVVVFDVTEGANDRLSCESAYFADAAEAYERDCAGHYALSSEEEDCGAVSDEGCSFDLPDAAAAAAAMFGAAGVVHHDAADDEEAQLGSWTAWFWS

SEQ ID NO: 54464 - protein, 70 aa, Oryza sativa
MLCPLLSVSKKSAMGMLFVVLQLGPYLGPRGCEWGNEDLDTFTPSGSLRYMVPVLPKLLSVTPPRRTDFG

SEQ ID NO: 54465 - protein, 362 aa, Oryza sativa
MQLPCRLLQVGKRRLRRRSALPWVWGLDWSALMATPLPQWPTFSCPVQFLLHLPKTLIQPPSSVERISGRVPTWLFMQELISLTLPDSLSLRNYRWLPGKGIPRKRKRRRTPKLWHWQAGRGLPLKWERRRKGWWQRPIKRKTWRNWKKRIKKLRGWEWRKERKKRGTKDCGRKNHGTTNCGAKQCGKRRIGTINCGVNQLRRKTIGTINCGAKQCGKESIGTINCGANHCRRKSIGTVNCGANHCGRKSIGTVNCGADHCRRKSIGTVNCGADHCGRKSIGTVNCGANHCGRKSIGTVNCGADHCRRKSIGTVNCGADHCGRKSIGTVNCGANHCGRKSIGTINCGVKDCQRKNIATTNCL

SEQ ID NO: 54466 - protein, 512 aa, Oryza sativa; identical to SEQ ID NO: 54084

SEQ ID NO: 54467 - protein, 136 aa, Oryza sativa; identical to SEQ ID NO: 39762

SEQ ID NO: 54468 - protein, 174 aa, Oryza sativa
MPLSSNISTQKTHYEVLSVNEGATYDEVRAGYRAAILNAHPDKSQAKLDSLVSSVEHGEFFSVQKAWEVLRDPKSRTEYDKQLQTSRQNSANIAYEIEIEEMTVESTGDAMELMYPCRCGDHFSILSSDLAEMGILVDDDGEIYFQSSDCVSASVVLSCGSCSLKTRLVINRTS

SEQ ID NO: 54469 - protein, 337 aa, Oryza sativa
MEKAKMGDVATIRAVLAILQWWGFNVTVIIMNKWIFQKLEFKFPLTVSCVHFICSSIGAYIAIKILKMKPLIEVAPEDRWRRIFPMSFVFCINIVLGNVSLRYIPVSFMQTIKSFTPATTVILQWLVWRKYFEWRIWASLVPIVGGIMLTSITELSFNMFGFCAAMVGCLATSTKTILAESLLHGYKFDSINTVYYMAPFATMILSVPAIVLEGSGVINWLYTYDSIVPALIIITTSGVLAFCLNFSIFYVIHSTTAVTFNVAGNLKVAVAVLVSWMIFRNPISSMNAVGCAITLVGCTFYGYVRHLISQQSVNSSPRTPRSRMEMLPLVGDKQEKI

SEQ ID NO: 54470 - protein, 331 aa, Oryza sativa
MDGLFSLANRLFGVSVEPADGLAPVWNSDVKFYCVKDSSNSPVAYFYFDPYSRPSEKRGGAWMNVVFSRSRVLARNGSPVRLPVAHMVCNQTPPVGDKPSLMTFREVETVFHEFGHALQHMLTKQDEGFVSGIRGVEWDAVELPSQFMENWCYHKNTLLSIAKHYETGELLPEEIYAKLVAAKNFRAGTFSLRQIRFASVDMELHTTYDPNGSLSIYDVDRRVAERTQVLAPLPEDKFLCSFSHIFAGGYAAGYYSYKWAEVLSADAFSAFEDVGLDNEKAIEETGRRFRETVLALGGGKSPLEVFVSFRGREPSPEALLRHNGLLPVAAL

SEQ ID NO: 54471 - protein, 197 aa, Oryza sativa
MASERVKGTVKWFDATKGFGFITPDDGGEDLFVHQSSLKSDGYRSLNDGDVVEFSVGSGNDGRTKAVDVTAPGGGALTGGSRPSGGGDRGYGGGGGGGRYGGDRGYGGGGGGYGGGDRGYGGGGGYGGGGGGGSRACYKCGEEGHMARDCSQGGGGGGGYGGGGGGYRGGGGGGGGGGCYNCGETGHIARECPSKTY

SEQ ID NO: 54472 - protein, 275 aa, Oryza sativa
MAAASPPPLALLTLTLSLTLSLASAGLVLDDGYTVTTAADLNHPGAPAAPHPYALLPRPRAGDLVLLDSAASALYTLALPLSGGAAARTLAGGGGGPAGFADGEPRDAAFDRPRSLAVDHADNVYVADRMNGAVRKIAPSGFTTTIAGGRSKGPGRKDGPAQNATFSSDFELVYVPKMCALLVTDRGNRLIRQINLKQEDCARETQPGLGTTSVSIIAVLCALLGSVIGFSIRHFYPAHAGSLHQPLFQEDADAVQDNPEDGRSDQLLRHQKRSC

SEQ ID NO: 54473 - protein, 275 aa, Oryza sativa; identical to SEQ ID NO: 54472

SEQ ID NO: 54474 - protein, 265 aa, Oryza sativa; identical to SEQ ID NO: 48611

SEQ ID NO: 54475 - protein, 406 aa, Oryza sativa
MSLLRRVGRRFLAGDILSSEASPHAVGRLFTEPPLPSPLEGVRSPSPLPLPRATKQPFIGIFSPFKSYPLQVIRESLPLAHHQSLSRNAIGPSYRWPWTRLTSAVALPKLLGTRWASTNTSSTTGFGPCFTSAGELIDALTYARANPLMRKVKIMGREDKIIWIPNDNLRRLVRSLNKTYALLHAKKKCLSSLTSSNVLVGEDGSAVIQGVIEIPYSEEEACCRYNETASILKELITESVGSEAIGVDCIADFRRLLRQMESMTSVCQEYIISNHASLIPDANRTAVFLLFYNHIMGKLAQEQPRLKNQIISKLPYDGIWLGIVISNRFLRRWLNSHREYVSTGDDDMSFNWNVRSHFYVHLWIFAYSQLEVEECLYGEFPELLLEIEILLWKANEIDGLGFEDKF

SEQ ID NO: 54476 - protein, 443 aa, Oryza sativa
MYGGDEVSAIVIDVGSYSCKAGYAGDDTPKAVFPSVVGSIEQTGETDEAKADKEAEAASDSKNGAKPMDVDKAKTKRKLYVGQELEFRRDHMEVISPMKDGTVTDWDIVDNIWNHAFRQRLLINPEEHPMLIAEPSTNTGQQREKAAELMFEKYKVPALFLAKNAVLTSFASGRATSLVVDSGGGSTVVAAVHDGYVLQKSVATSPIGGEFLTDCMMKSLESKGVVIRPRYSFKKKEVGPGEYKVVDLDLPNTTESYKLYCMRAIASDIKESVCRVPDTAFDEVAYANVPTTSYELPDGQTIEVGADRFKIPDILFNPSLSQTIPGVDGFADSMSVRGLPRMVIDSVNRCDVDIRKELLSSILLSGGSSSILQLKERLEKEVLEESSGNTRVKVLASGNSVERRFSVWIGGSILASLGSFQQMWFSKAEYEEHGVSYIQRKCP

SEQ ID NO: 54477 - protein, 89 aa, Oryza sativa
MAATTTSSSSGGGNRIWTSSLAVLALAVALVSLLSLRAPPPAAPSMADDLPTSVHDISVKVAMLRRLAFLFFDTVSWFLERGWMRRFFP

SEQ ID NO: 54478 - protein, 321 aa, Oryza sativa
MDTTTRAKIPSLHHQTEINWDNLDKTKLYVVGAGMFSGVTVALYPVSVIKTRMQVATGEAVRRNAAATFRNILKVDGVPGLYRGFGTVITGAIPARIIFLTALETTKAASLKLVEPFKLSEPVQAAFANGLGGLSASLCSQAVFVPIDVVSQKLMVQGYSGHVRYKGGLDVAQQIIKADGIRGLYRGFGLSVMTYSPSSAVWWASYGSSQRIIWSAFDRWNDKESSPSQLTIVGVQATGGIIAGAVTSCVTTPIDTIKTRLQVNQNKPKAMEVVRRLIAEDGWKGFYRGLGPRFFSSSAWGTSMIVCYEYLKRLCAKVEEV

SEQ ID NO: 54479 - protein, 526 aa, Oryza sativa
MGSPSYRLAAAITIPSTDEFLLVRQPPPPSPAPAPEEEEYLYRGYVDSELYDLPSAPLRPLAGELRSDVAIRGADPVAGRLDISRLDVSASLDQICDQFGLPSGICGEWRLLKYVEEAEFGPDAGLNTVLIIGSLESKLEALQDSWRWMSKECASGLLSGAKSGGTRIGPYAYIGLLKPELPSNWTVAPALPCQEYPPGIKLVPMKSNTLQPFRTTNLVVVVATDTPGGSTCSDCVVYGDALLIDPGCCSQVHGKLAELVNSLPKKLVVLVTHHHHDHVDGLSVVQRCNPDAVLLTHKNTMSRIGKGNWSIGYTAVAGGENICIGDQQLQVVFAPGHTDGHMGVLHVNTNALIVGDHCVGQGSATLDNRAGGNMKDYFQTTYNFLDMSPHVLIPMHGRINLWPKHMLCGYLRHRRAREVSILQSIENGARTLFDIVSKTYADVDRKLWIPASFNVRLHVDHLNSQNKLPKSFSMDKFEVSCGTNFMLWWAVAYVQARSSPAILAATALAGGLAIAYALKRNSGNEP

SEQ ID NO: 54480 - protein, 89 aa, Oryza sativa; identical to SEQ ID NO: 54477

SEQ ID NO: 54481 - protein, 446 aa, Oryza sativa; identical to SEQ ID NO: 37271

SEQ ID NO: 54482 - protein, 217 aa, Oryza sativa
MAAADAVAPDDGDHAVLRDDERGIPRSLSLLAALVEAEALCHATAADADADSDLIRAFRGGATPTVRIAAPRGRRGSSSTRPPRTDSSPSRSSWAPSSAGPSTGSRRGGPWCSRPARTPRSARGRWPASNGASLLPSITACSSVPTSSTGSVVSWSEGRGQAGDAAAAVLAGRGRRRKLWREKRRMAAAASGPPCRRHLSSPTRTTISASTGSIIFT

SEQ ID NO: 54483 - protein, 375 aa, Oryza sativa
MAGAGGGGVRDMDALEGVRSIVLKPSESLDEGRFTRIAGADFNDAGLGLPGLLASLATTGFQASNLGDAVDVVNQMLDWRLSHEKPREDCDEAELDPTYRESVKCKIFLGFTSNLVSSGIRDVVRFLVQHHMVDVIVTTAGGIEEDLIKCLAPTYRGEFSLPGTLLRSKGLNRIGNLLVPNDNYCKFENWIMPLFDQMLQEQSTENVWTPSKVIACLGKEINDESSHLYWAYKNNIPVYCQALTDGSLGDMLFCHAVRNPGLIIDIVQDIRLMNGEAIHATPRKTGIIVLGGGLPKHHICNANMFRNGADYAVYINTAQEFDGSDSGAQPDEAVSWGKIKGSAKPVKVHCDATIAFPLIVAATFARKFHGAKQAN

SEQ ID NO: 54484 - protein, 496 aa, Oryza sativa; identical to SEQ ID NO: 45329

SEQ ID NO: 54485 - protein, 624 aa, Oryza sativa
MLEELLIFTRGGLILWSSCRALGGAALKGSPIDALIRSCLLEERSADASFSQDTYALKWTFNNDLGLVFVAVYQRMLHLLYVDDLLAAVRKEFSQIYDPKRTSYDDAFNEVFRQLHLEAEARSEEMKKNKQVTGSRPTKVTTKTNRGDTQGSGGGRKKGDSGKDDSDGDSGKEHTLPNGNSKMQENSLKDNSHARSVVVKGKENGDPNDGAFDVNKLQKMRNKGNKKNEVASNVAKNTSKANTKKNLKKNRVWDDTPDDKKKLDFTDPADERGDEVIDQVVVKQGESMMDKDDVVSSDSDEEEEDGEENSGASQKKKGWFSSMFKSIAGNNVLEKSDIQPALKALKDRLMTKNVAEEIAEKLCESVAASLEGKKLGSFTRISSTVQTAMEEALLRILTPRRSIDILRDVHAAKERGKPYVIVFVGVNGVGKSTNLAKVAYWLLQHNLSVSLAACDTFRSGAVEQLRTHARRLQIPIFEKGYEKDPAVVAKEAIQEATRNKSDVVLVDTAGRMQDNEPLMRALSKLINLNSPDLVLFVGEALVGNDAVDQLTKFNQKLADLSAVPTTRLIDGILLTKFDTIDDKVGAALSMVYISGAPVMFVGCGQSYTDLKKLNVKSIVKTLLK

SEQ ID NO: 54486 - protein, 478 aa, Oryza sativa
MDAGECSSSQPCASSSPDAAGGVWAKLVPSDSAFPEVELAEDDAVVCSRVTPDGGGEVAAWCEIRRGGGDGDASSATIRNLSSDAIIVDGRVIQQEAVDIKPGSEIVSGPQKDGHLLYTFDITGLNDQDKTNIKIVLDIENAKCSICLNLWHDVVTVAPCLHNFCNGCFSEWLRRSSANSRDKSQSAACPQCRTAVQSVGRNHFLHNIEEAILQAFSSLQRSDEEIALLESYASVKTNIVLGKQKIQSRKRRLPRSNDEANHTNHADFLCPQCGAEFGGFRCSPGAPHLPCNGCGGMMPARPDTSIPQKCLGCDRAFCGAYWCSQGVNSSQHNPICDQETFKMISQRHISSVPDTVHGGNQYEKDITERCIQQSGKALQAIISEWIVKFDNKELDRSRLQLNHVDAITSRTYVCNQCYSKFIDFLLYWFRVSMPRNLLPPDAANRESCWYGFMCRTQHHRPDHAKKLNHVCRPTRGNP

SEQ ID NO: 54487 - protein, 402 aa, Oryza sativa
MMQPPPPPQWAMGPPPPPQYFQAGPPPPPPQYFQGAHPPAAMWGQPPPPQAAPPPAPAGGAAGDEVRTLWIGDLQFWMEENYLYNCFSQAGELISAKIIRNKQTGQPEGYGFIEFGSHAIAEQVLQGYNGQMMPNGNQVFKLNWATSGAGEKRGDDGSDYTIFVGDLASDVTDLILQDTFKAHYQSVKGAKVVFDRSTGRSKGYGFVKFGDLDEQTRAMTEMNGQYCSSRPMRIGPASNKKNIGGQQQPSATYQNTQGTDSDSDPNNTTVFVGGLDPSVTDEVLKQAFSPYGELVYVKIPVGKRCGFVQYSNRASAEEAIRMLNGSQLGGQSIRLSWGRSPGNKQPQQDQNQWNAGYYGYPPQGYDPYGYVRPPQDPAMYAYAAYPGYGNYQQPAPQQPPQQ

SEQ ID NO: 54488 - protein, 605 aa, Oryza sativa
METHIGSVDGAAAAADNGAVGCPASAVGCPMTSARPAPVSAGEASLGRHLARRLVQVGVSDVFAVPGDFNLTLLDHLIAEPGLRLVGCCNELNAGYAADGYARARGVGACAVTFTVGGLSVLNAIAGAYSENLPVICIAGGPNSNDYGTNRILHHTIGLPDFSQELRCFQTVTCHQAVVTNLEDAHEQIDTAIATALRESKPVYLSISCNLPGLPHPTFSRDPVPFFLAPRLSNKMGLEAAVEATVEFLNKAVKPVLVGGPKLRVAKAGKAFVDLVDASGYAYAVMPSAKGLVPETHPHFIGTYWGAVSTAFCAEIVESADAYLFAGPIFNDYSSVGYSFLLKKDKAIIVQPERVIVGNGPAFGCVMMKEFLSELAKRVNKNTTAYENYKRIFVPEGQPLESEPNEPLRVNVLFKHVQKMLNSDSAVIAETGDSWFNCQKLKLPEGCGYEFQMQYGSIGWSVGALLGYAQGAKDKRVIACIGDGSFQVTAQDVSTMIRCAQNSIIFLINNGGYTIEVEIHDGPYNVIKNWNYTGLVDAIHNGEGKCWTSKVKCEEELTEAIGMALGEKDCLCFIEVIAHKDDTSKELLEWGSRVSAANSRPPNPQ

SEQ ID NO: 54489 - protein, 494 aa, Oryza sativa
MQRRRGLAALAVLLALAARGADASVHEYSGGGFAPRANSFFFHGGSEGLYASDPTSNSSASFIRFDSVTFRRTQESAGRHEAMQQKTGLVEAIIVEIQDRSKIGGSYLHSDAICCTPELDKEKSCKVGEVIIQPNPDNPDWPKRVRTFFSGRDEEASMVTQVVSINKTGMYYLYFMFCDPQLKGLKITGRTVWRNPQGYLPGKMAPMMTFYGFMSLAYLVLGLLWFLQFVRCWKDILQLHYHITAVIALGMCEMAFWYFEYANFNSTGNRPMAITLWAVTFTAVKKTISRLLLLVVSMGYGVVRPTLGGVTSKVGALGVVYFIASEGLELVENLGNINDFSGKTRLFLVLPVAILDATFIIWIFSSLSRTLEKLQLRRSMAKLELYRKFTNSLALSVLISIAWIGYELYFNATDPLSELWRRAWIIPAFWNVLSYVLLAIICILWSPSRNPTGFAYSEDTADEADEEGLSLVGSAVKGTGDIVNMHVFPEDKRA

SEQ ID NO: 54490 - protein, 143 aa, Oryza sativa
MTYIDCSLSPPEFLLRSIRAQLKGRGMDAMADLMDAADDAASSLPLSPSSSSSASSDEDSPFGRARRARRSSSGSFRWRSTKDVAACHAGSSLVAVMAQALAHRVGYVWVVDEVSGALTGVVSFGDVLAVLREHLRDGDTQMN

SEQ ID NO: 54491 - protein, 387 aa, Oryza sativa; identical to SEQ ID NO: 31330

SEQ ID NO: 54492 - protein, 411 aa, Oryza sativa
MLACIACSTKDGGEGGHRSATATPNSGKSLTSQLKDMVLKFSGSGRHQYKSGGSPSLRTSRFHRSSRLAAYPGIIDESGFTSDGAGEAYTYMRTTTASAGARAAPSTWDLPPKVNHRSFQPRVIRSPSASGVPSIGEEDYDDDDDDDDEETVLLEEDRVPREWTAQVEPGVQITFVSIPGGAGNDLKRIRFSREMFNKWEAQRWWGENYDRVVELYNVQTFSRQQGFSTPTSSVDEAMQRDSFYSRVGSTRESPAMMMPPPPPLPSSGAGREHPISRTASSKAQLSSSSSVAAARPPFYPSTAVPDPSDHVWAHHFNLLNSAAAGPAAPYDPSRGTTSSRDEASVSISNASDLEATEWVEQDEPGVSITIREFGDGTRELRRVRFSRERFGEERAKVWWEQNRDRIHAQYL

SEQ ID NO: 54493 - protein, 264 aa, Oryza sativa
MAAAAGGGTREEMVYMAKLAEQAERYEEMVEFMEKVVTAAAAGGGGELTVEERNLLSVAYKNVIGARRASWRIVSSIEQKEEGRGAAGHAAAARSYRARVEAELSNICAGILRLLDERLVPAAAAVDAKVFYLKMEGDYHRYLAEFKTGAERKDAADATLAAYQAAQDIAMKELSPTHPIRLGLALNFSVFYYEILNSPDRACTLAKQAFDEAISELDTLGEESYKDSTLIMQLLRDNLTLWTSDMQDDGGDEMRDATKPEDEH

SEQ ID NO: 54494 - protein, 558 aa, Oryza sativa; identical to SEQ ID NO: 45175

SEQ ID NO: 54495 - protein, 305 aa, Oryza sativa
MKRPTSSSRKSKKQGEDLAFSEEGSLPAVTMEQKDEAEMEEVDEEEEEEVDEDMAGGHAAQSPSPSCGLGEKKRRLALEQVRALERSFDTDNKLDPDRKARIARDLGLQPRQVAVWFQNRRARWKTKQLERDFAALRARHDALRADCDALRRDKDALAAEIRELREKLPTKPADTAASVKVEAGNDAAAGAAAATVCKDGSSDDSDSSVVFNDEASPYSGAAFIGFGPSFLVDDASGNRGLLVVAPRARVQMARSVLRRLVQRRRLWLHGGMARCLLRRDGRQRRRRLLLRRARLQPQLRLVREW

SEQ ID NO: 54496 - protein, 365 aa, Oryza sativa
MSMEEAEECSAACGFSLTCQEDGADLGDGVVDDDDDGDVFLFYNAVAAADDEKEEEEYVEQMVSKEASFCCSSSSSLFDAAAGDGYGDGDGDGDWFRQARLAAVKWILETRGYFGFGHRTAYLAIAYFDRFCLRRRVDREAMPWAARLLSIACVSVAAKMEEYQSPALSEFDAGGGRVFCSDSIRRMELLVLSTLGWRMGAVTPFDFLPCFSSRLHRHHHGGAGAAGHGAAAAARVALNAVGFIFATAEAGSVLDYRPSTVAAAAILAASYGAPLTKEALESKMSNLSPSCLIDKENVHACYSMMVGDMNNNRRSSKRPLQCSDSNEITTTSTYDSVLVDDVTDTAAFAATAMNKRLRPEPPRIR

SEQ ID NO: 54497 - protein, 578 aa, Oryza sativa; identical to SEQ ID NO: 35348

SEQ ID NO: 54498 - protein, 438 aa, Oryza sativa
MDLLKRELEKKRKAATADFGGKSFVRRSELEQKQLQKRRHEEHRQLLSKAPPATSSASAAGSDPSNPNADPAQSSAANPNPNSSSSAAAASVPPGLAGKKTAQDEALLSEERRIDELDLPRHEVVRRLRILREPVTLFGEDDADRLARLKFVLKSGVIDDIDDLDMTEGQTNDFLRDMVELRKRQRAGRDTYVKGKGKRAGGGDGGEGGAGGDNADDGDGDGRRSGDDADADKDSKRMKTKFEELCDEDKILVFFKKLLIEWNQELDEMPELEKRTAKGKSMVATFKQCARYLSPLFEFCRKQVLPDDIRQALLVIVECCMKRDYLAAMDQYIKLAIGNAPWPIGVTMVGIHERSAREKIYTNSVAHIMNDETTRKYLQSIKRLMTLCQRRYPALPSKSVEFNSLANGSDLQALLSEEKDPGNPPSEDRLRLMPASKE

SEQ ID NO: 54499 - protein, 429 aa, Oryza sativa
MDYHSEGTVNFRCLEKNLRQVQKSVQILQDKHEISETPNEFSKLQIAHEFPARANEASAFSTFGRENDHSTQVAKHEVAFMPLQQVNAMQSPAVPVQSSNGYILQQLVPVSLSTQPDQQQPSQAAVYYMQSQNPIKCTESEPSESAVHVIQSQIQNPEARVAVDLSQKSSQVTELYPQPQDQRLHLPAQQVESQAWRTQPLVVQPQQYNIQQVPPQLVQQQTSSPQAQSAPQVAVLYPPYSSQKPASATTEPLLRNMVVHSPYSSPQQKHHEAMPSFYGQGNTVLLPSTDLNIQHQQPQPLQQHGLSSCPPQPSKPNHCSVASYAVQGSGQSYSATFKNPSNCAATVVAVLPQHPASGPMAFHHLGPQVVHNQPFGNMFETASVVGYPRDRVESVALPVVTAAQPADSVAMADKLNAGSNVTSPREWSG

SEQ ID NO: 54500 - protein, 268 aa, Oryza sativa; identical to SEQ ID NO: 52664

SEQ ID NO: 54501 - protein, 447 aa, Oryza sativa
MKKSREGNLKHVKGSLCLVPPLLLAVFFYLQFQTLGLFSPIFRCGGQSAGGGGGDDYVDRLRASATFLPLKDTREWAETWFISTLDDTSEPEGEAKNIVFPSAASAGRLLCMSAPSRRDGTRNAYALAWRDALPGGAELRPGLAYVSETAYDHSNLWHGISALIPFASWHARSGCRARPARWALFHHGEVRLGMSPWLTSLAEATTGVGMVVETFNASDVPVCFEEAVVFRRNMAGMTRERLLAAFDFMRCKARAQCGVVADVSDPDSAAVRVTILFRTGARAFKDEAAVTRVFKSECARVAGCALTTARSDNLTFCDQVKLMSGTDVLISSHGAQMTNLVFMDRNSSIMEFYPKGWRERAGGGQFVYRWGADRSGMRHEGSWWDPHGEPCPGSPDILSCYKNRQIGHDEAYFAQWAARVFAAAKERKAGGSPASTRRREAPTCQCS

SEQ ID NO: 54502 - protein, 595 aa, Oryza sativa
MVEVGGRVRGFVRNRWLVFVAAMWMQSFAGVGYLFGSISPVIKASLGYNQREVAGLGVAKDLGDSVGFLAGTLSAVLPLWAAVLVGAAQNLFGYGWVWLAVTHRAPVPPLWAMCILIFIGTNGETYFNTAALVSCVQNFPKSRGPIVGILKGFAGLSGAILTQMYAMIHSPDHAALIFMVAVGPTMVVIALMFIVRPVGGHRQVRPSDGTSFTFVYSVCLLLAAYLMGVMILGDLVDLSHTVMVLLTIILIVLLIVPIVIPVILSFFSDNDESAYASLLQSPGKEEASASTPSEEQTEVIFSEVEDEKPKEVDLLPASERQKRIAELQTKLFQAAAVGAVRVKRRKGPRRGEDFTLMQALIKADFWLLFFSLLLGSGSGLTVIDNLGQMSQSLGYEDSHIFVSMISIWNFLGRIGGGYFSELIVKDYAYPRAIALATAQVFMAFGHFSFAMAWPGAMYIGTLLVGLGYGAHWAIVPAAASELFGLKNFGALYNFLTVANPAGSLVFSGIIASGIYDSEAEKQAHQHHNSTLLAMPGRLLAMASDATQPLKCEGAICFFLSSLIMSGFCIVAAVLSLILIYRTKIVYANLYGNPRT

SEQ ID NO: 54503 - protein, 210 aa, Oryza sativa
MSMKLQRSLSLLFVQGPRLSNGAGDAGAKNNAARTVEERIEEYNKARARIFNGSISDIEGTSDLGALSVARDEPINVEPPVDENKVNTMNSRSRVAVFKDTEKDRSDPDYDRNYKRYVRGPVHDFNVSPGGFNFVVPQFMQYGVGFMQSANMSRNQPSVYFGQPDLSMGSSSGTAVYPQWPTPAMIYPHCYDNLGHMISQVPVYQSFNHG

SEQ ID NO: 54504 - protein, 891 aa, Oryza sativa
MASSQGLKKNYRCDRSLQQFYTGGPFAVGSSPGGGEGEVEGGEAEAEAFLACACGGEVRLVSAADASAIGEPIEGENEAVTALALSPDSRLLFTAGHSRLIRVWDLASRTCTRSWKGHDGPIRAMACHASGGLLATAGADKKVCVWDVDGGFCTHFFRGHAGVVTTVMFHKDPKRLLLFSGSEDATVRVWNLESKKCVAVLKEHFSAVTSLALSEDGQTLLSAGRDKIVNVWDVRKYNSKKTIPAFEMIEDVSFIGPGSNLLSCLGEPANIKRKTDGYFLTVGERGVVRIWCLESAQCIYEQQSSDVTVNTENEESRRGFTSAVMLSDDQGLLCATADQQFLFYCPTRTDGGDFQLNLYKRLVGYNDEILDLKFVGEDEQYLAVATNLEQVRVYDVASMSCSYVLSGHTEIVVCIDTCISSSGKTLVVTGSKDSTVRLWDMERRSCIGIGKGHLGAIGSVAFSKKSKNFFVSGSSDRTIKIWSWDDTLDDVGSEVPLKAKAVVAAHDKDINSLSVSPNDGLVCSGSEDRTACIWKLPNLVPSVVLKGHKRGIWSVEFSPVEQCVITSSGDRTVKIWAVADGSCLKTFEGHTSSVLRASFLSHGTQFVSCGSDGLVKLWTIKTNECIATFDKHDGKVWALAVGKKTEMLATGGTDAVLNLWHDCTMEDKQEDFRKKEEELLRGQELENAVSDYDYAKAIQLAFELRRPHRLLELFTQLCRESDLEDPIEKALIGLPKEGLRVLLEYIREWNTKPKLCHVAQFVLFRVLRSLPPTDILEIKGISELLEGLIPYSQRHFSRVDRLVRSTFLLDYTLTRMSVVDPDIDEGTTRDDANGSSVENCEIAQAKPDALVAEENLQKSVKKRKSSKSSKKGGKKVKIASTGGSKDVPIEA

SEQ ID NO: 54505 - protein, 537 aa, Oryza sativa
MNGESLLDRSSSADAAMNDAVPGHRHHHPLSVFLRDARLAFRWDELGREIMGIAVPGALALMADPVASLVDTAFIGHIGPVELAAVGVSIAVFNQVSRIAIFPLVSVTTSFVAEEDATSSDREKYEINGENEFNVSDSEMEELVSHEEASAAPSKSSFETDSSDVKIEHKRKNIPSVSTALLLGGVLGLLQALLLVICAKPLLGYMGVKQGSAMLMPALKYLVVRSLGAPAVLLSLAMQGVFRGLKDTKTPLYATVAGDATNIVLDPIFMFVFQYGVSGAAIAHVISQYFIASILLWRLRLHVDLLPPSFKHMQFSRFLKNGFLLLARVIAATCCVTLSASMAARLGSVPMAAFQICLQIWLASSLLADGLAFAGQAILASAFARQDHSKAAATASRILQLGLVLGLLLSIFLGIGLRLGSRLFTDDQDVLHHIYLGIPFVSLTQPINALAFVFDGINYGASDFGYAAYSMILVAIVSIIFIVTLASYNGFVGIWIALTVYMSLRMLAGFLRIGTARGPWTFYAAQRMHSHEVVGLC

SEQ ID NO: 54506 - protein, 360 aa, Oryza sativa
MVKAGFAGDDAPRAVFPSIVGRPRHTGVMVGMGQKDAYVGDEAQSKRGILTLKYPIEHGIVSNWDDMEKIWHHTFYNELRVAPEEHPILLTEAPLNPKANREKMTQIMFETFSVPAMYVAIQAVLSLYASGRTTGIVLDSGDGVSHTVPIYEGYALPHAILRLDLAGRDLTDSLMKILTERGYSFTTSAEREIVRDIKEKLAYVALDYEQELETAKSSSSVEKSYELPDGQVITIGAERFRCPEVMFQPSLIGMEAPGIHETTYNSIMKCDVDIRKDLYGNIVLSGGSTMFPGIADRMSKEITALAPSSMKIKVVAPPERKYSVWIGGSILASLSTFQQMWISRAEYEESGPAIVHRKCF

SEQ ID NO: 54507 - protein, 368 aa, Oryza sativa
MVSTTEFKGEYSLPSKKSPLDQFEGVKTHLYRLGAEHENGTLKSFAYTDQGSPSLLDTIILSQWEDYAWKGHFGYDVTACNLKVVEGGWSFVVQLNDKWNSCVLKEHDKFLEPVGCLKPNCMNSYDELLLCIAQGDKDIPEVVPSTKPPKDGLLLIANAYPVEYGHIFLVPSATNQLSFFWDKRMFSLIARIASEVNSAAFRVFFDSCTSTMPDHMFFQACYFANPLPVESASTVAIYHGKATSAVHLYEIIDYPMKALVLTGKDVNTLANFVSEVSLTLHDNNTAYSLLISNNGTKVFLFPQVKNLATGCCLSAWECSGYFIYRAKYDFDRASENEISNRMASVTLQDGAFENLKNLCCAVADDLVM

SEQ ID NO: 54508 - protein, 486 aa, Oryza sativa
MASPPPPPPSAAAPGSPPSAQVVGNAFVHQYYNILHQSPDLVHRFYQDGSRIGRPASPAAAEMDTVTTMEAINAKIVSMDIVRAEIKAVDAQESLGGGVTVLVTGHLTGSDDVRREFSQSFFLAPQEKGYFVLNDILRYVGGEGDQEVEPEPELELSFPPSQQPDSVPAPSANGTSVPREQEAFSQPEQHVADPAPNAQEADLNGEEVYNPPNNTEGPVVEETPIPEVIDEVPNNVAVAMPTPPAPAPAPVPQEEAPKKSYASIVKVMKEIPPQISAIPSRPAPPKQEKQVAPAPVAPVADAPTFSPNPESSNIQEAEVDAHAIYVRNLPLSATPEQLEEAFKKFGAIKPDGIQVRSHKIQGFCYGFVEFEDPSSVQSAIAGSPVTISDRQCYVEEKRTAGSRGGGRGRFAPGRGGNFRGEGMRGRGNYTGGRGYGRGEFNYRSDYGGRGAGRGGSSRGGDVGYQRVDHSAGRAARAPSGTSAVAK

SEQ ID NO: 54509 - protein, 865 aa, Oryza sativa
MASTAAIAALALVFFVLLCVRDGGGVDAADTLSQGQSLGANDMLVSANGTFKVGFFTPAGGDPGKVYLGVMYATSNVQTVMWVANRDAPVRTAAGAASATVTGSGELLVKEGDRVAWRTNASAAGRSKHTLTIRDDGNLVISGSDAAGTDVEWESFHHPTDTFVPGMEIALRQTNGDRTLYTSWRSDADPATGDFTLGLDASAQLYIWRSQGGKNSTYWRSGQWASGNFVGIPWRALYVYGFKLNGDPPPIAGDMSIAFTPFNSSLYRFVLRPNGVETCYMLLGSGDWELVWSQPTIPCHRYNLCGDNAECTADDNEPICTCFTGFEPKSPQEYNNGNWTQGCVRSVPLTCSSERNNTTAGGAGAGGGDGFTVIRGVKLPDFAVWGSLVGDANSCEKACLGNCSCGAYSYSTGSCLTWGQELVDIFQFQTGTEGAKYDLYVKVPSSLLDKSSGRWKTVVVVVVVVVVVVLLASGLLMWKCRRRIKEKLGIGRKKAQLPLLRPARDAKQDFSGPAQSEHEKSEEGKNCELPLFAFETLATATDNFSISNKLGEGGFGHVYKGRLPGGEEIAVKRLSRSSGQGLEEFKNEVILIAKLQHRNLVRLLGCCIQGEEKILVYEYMPNKSLDAFLFDPERRGLLDWRTRFQIIEGVARGLLYLHRDSRLRVVHRDLKASNILLDRDMNPKISDFGMARIFGGDQNQVNTNRVVGTLGYMSPEYAMEGLFSVRSDVYSFGILILEIITGQKNSSFHHMEGSLNIVGYAWQLWNGDRGQELIDPAIRGTCPAKEALRCVHMALLCVQDHAHDRPDIPYVVLTLGSDSSVLPTPRPPTFTLQCTSSSSGRDMYYRDKEESYSANDLTVTMLQGR

SEQ ID NO: 54510 - protein, 391 aa, Oryza sativa
MTSRVIPAPTPTPRRLIPVNSADVMGHFDLDSRNSSFGTFTVLSYNILADTYATSDTYSYCPTWALSWPYRRQNLLREIIGYHADIICLQEVQSNHFEEFFAPELDKHGYQALFKKRTTEVYTGNLQSIDGCATFFRRDKFSHVKKYEVEFNKAAQSLTDAIIPAAQRKVALTRLIKDNIALIAVLEAKFGSHGADNPSKRQLLCVANTHINVHQDLKDVKLWQVNTLLKGLEKIAVSADIPMLVCGDFNATPGSTPHGLLAMGKVDLMHPDLAIDPLGILRPASKLTHQLPLVSAYSSFARMVGAGYDLEHQRRRMDPATNEPLFTNCTRDFTGTIDYIFYTADSLSVESLLELLDEDSLRKDTALPSPEWSSDHIALLAEFRCKPRVRR

SEQ ID NO: 54511 - protein, 506 aa, Oryza sativa
MESPLSHPAMVALSLLLLVALYLARRAVLGKKRRYPPVAGTMFHQLLNFGRLLEYHTELSRKYRTFRMLTPTCNYVYTVEPANVEHILKTNFANYGKGPMTHDVLEDLLGDGIFNVDGGMWRQQRKVASLEFSTRVLRDYSSAVFRDTAAELAGILERGPAAKGRERVDMQDLLMRATLDSFFRVGFGVNLGVLSGSSKEGLVFARAFDDASEQVLFRFFDLLWKVKRFLNISSEATMKQSIRTINDFVYSIIDRKIEQMSREQHEFAKKEDILSRFLLEREKDPGCFDNKYIRDIILNFVIAGRDTTAGTLSWFLYAVCKNQRVQDKIAREVRDATTGDRDVGVQDFSSFLTEDAINKMQYLHAALTETLRLYPGVPLDVKYCFSDDTLPDGHAVKKGDMVNYQPYPMGRMKFLWGDDAEEFKPERWLDDSGMFVAESPFKFTAFQAGPRICLGKEFAYRQMKIVSAVLLYFFRFEMWDDDATVGYRPMLTLKMDGPFYLRALAR

SEQ ID NO: 54512 - protein, 556 aa, Oryza sativa
MPESPTSPPTSPLPGSPTNNATPPSPVSAFLRATVLFAAFLALQLVLFKSLLTFPSSRFLPAPRRSNSTWANGAVDDAEECKAGLIYVYDLPPEFNHDLVAHCDRLWPWYSFCPYLSNGGLGRPAAEVPALSAVVPNASLPNWYNTDQFPLEVIVHRRLLSHRCRTIDASLATAFYVPFYAGLDVGSHLWGPNSTVADRDRAGARLLRWLRGQPFFAKSGGWDHFITLGRITWDFRRYGADGWGTNLVLMPGMENVTRLVIEGDRLDPLDVGVPYPTGFHPRRAADVRAWQEHVLSLDRRNLFGFAGAPRSGFPDDFRDVLLEECEDAGSDRCRAVDCRGTRCNDDGAAVMRLFMGSRFCLQPRGDSFTRRSLFDCMVAGAVPVLFWRRTAYDAYRWFLPRGEEGEWSVFIDRRALRVGNVSVRDVLEGYSERRVRRMRERVVEMIPRLVYGSSPDGLGDGMDDALDVALGGVLKRFRHRRWSIGHEERPPGRLVAGAPPRRGSSKTTTPPTSNGRNGSVIGQRASRHRSTAASSAYIKTVLSEAPASRSKSLQQS

SEQ ID NO: 54513 - protein, 489 aa, Oryza sativa
MGEARRGQNPHHVLGYGFHGTTLPNSMASANLFEQGGGGGGGAAYFGELEEALVHQVATLRRRAQQTATTTTSHHGHTTPFSTAAAAATATATARPPATLDIFPSWPMRRSSLPTPKDGCSNVTADTTDSESSSKNNGDQGAAAADMASQFDQIPQQQQKQHKKMAASSTHSDHRMTKTLDPKIMRRLAQNREAARKSRLRKKAYIQQLESSKLRLAQMEQDLERARSQGLLLGGSPGGNTSAGAAMFDAEYGRWLEDGGRRMAELHGGLHAHLPDGDLRAIVDDALAHYDELFRLRAAAAKADVFHLITGTWATPAERCFLWMGGFQPSDLLKTVAPQLDPLTEQQVVGICSLQQSSQQAEEALSQGLEQLHQSLAETVANGGSVVNEASLGSFMGYMALALGKLSNLEGFVIQADNLRQQTLHQMHRILTIRQAARCFLAIGEYHNRLRALSSLWASRPREILVADEGNCGELSIAAQPSESQFSAF

SEQ ID NO: 54514 - protein, 381 aa, Oryza sativa
MTFPKEGSRLTPSHPAEDFKWKDYCPMVFRNLREMFKIDAADYMISICGNSALRELSSPGKSGSVFFLSQDDRFMIKTLRKSEVQVLLRMLPKYYHHVRTYENTLITKFFGLHRVKPSSGQKFRFVVMGNMFCTELRIHRRFDLKGSSLGRSTDKIEIDENTTLKDLDLNYSFYLEPSWREALLKQIETDSEFLRTQRIMDYSLLLGVHYRAPQHLRTRASYHRSMAADRLTVLSEEDAQEDDAFNYPEGLVLVQRGGDENSVVVGPHIRGSRLRSTAAGFAEVDLLLPGTARLQIQLGVNMPARAEQNPKEEESKSFREVYDVVLYLGIIDILQEYNMSKKIEHAVKSMQYDSISISAVDPQFYSERFLKFIQTVFPENS

SEQ ID NO: 54515 - protein, 401 aa, Oryza sativa; identical to SEQ ID NO: 48772

SEQ ID NO: 54516 - protein, 43 aa, Oryza sativa
MFFSFPDYYLLEFPPDRTEWRRCTCRREEANGGRPQDVGAGGV

SEQ ID NO: 54517 - protein, 480 aa, Oryza sativa
MEGFCFARCRFTRLVVAMQLVMGVLVICISMASLHRFYTTDALLPGGLDDPARCARFHGAVAGGYSGFDIRALADRVDEVLVQLAELQDKLEATALKIGKKTKKRKGKGKLQQQENMTMTEFQRFLEDEVIHPLYGAHIVLRLIRIPRPDPDGGAPAVDPLVNFFAAEETRKYVTAKRNREGRPGAYGANRTYGSIGHACVVMRRELDECMSYDVGALCPDDWDLGQRLMLGGCDPLPRRRCLARASKLFRRPLPINESLWALPDDGNVRWSRYHCRGYRCLSARNPRRGYDRCVGCFDMDREKQRWMQGSNGTTLADFRMEEVLAVKPGEIRVGLDVTVGTGSFAARMRERGVTVVTTAVNLGAPFAETVALRGLVALYAGLGQRLPLFDNSMDMVHTGGVLDGWVDLQMLDFVLFDWDRVLRPGGLLWVDKFACARKDLDDYMYMFLQFRYKKHRWVVSFKSRDEVYLSALLEKPLRS

SEQ ID NO: 54518 - protein, 804 aa, Oryza sativa
MLIIRDRRADDKWKVEFVELEHNHPCTPDMVRFLKAYREMPDSAKKKAKISDEMDDRVEKSLSEIAETRKFPTRPKRSVGGGASVGGFRFSRSDSFVQRFGDDDLIALKKFIEAMQRKKPNFIHYWDLDQETHVKNFFWTDSRSQAQYRYFGDVITLDVMYLQHSRASLPLATILGVNNHGHLVLLGCGLLCSDKKENYVWLLKRWLGCMNGKPPEAITTTYSDAVAEAVAEVLPNARHRFCFWHILKKLQENVGRTNEKEAISLRFKEVVYDTVTLTDFEREWGPMVEQYKLKDNDWFSALYSCRKQWAPGYVNHSFWAGTSAIRKVEKPDPYFDGVVTTKTTLPVFLEQYETTLRGKLEREAYDDLRSYYSRLTSLSGLPFEEQLMELYTVPMFQAFQDEIKQLIHVICKEVDRSGNSITYMASELIQGKKVNYTVVYNSADKDVWCICRSFPSRGILCSHALSVLKQENVLMLPSKYILNRWRKDFRVLHATASSSSISSDRDLSIFNDLYVRGHEYLEDVIDIGAREPELKEFVLTVMKEAKDKLVRPDHIHQADQRVDVNMSVTGQVSADRGVDVNISSNSTSLIQGDRRVDTNVTSNTTAMVHGHGDSMTSNTTAMIRGDRRVEMKIPTPHLIHGDGRIDMNMASPLLMQRDRRVDMNMASPHMIQGDRRVDMNLASPHFIQSDRRVDMNLASSHLIQGDRRVDMNMTSPHLIQGDTRVDMNMVSTAQNGMHSFDLVNVNLESGPLPMAATDFMQMHQHPPVYHPKQLLNMRDQVMDTNKRPNMETNTYFMGGGMHVG

SEQ ID NO: 54519 - protein, 262 aa, Oryza sativa
MATAEKKRPRSSSSNGGAGKRLSRKEILGRKKAVKELIRKAVAMKDHLAQFPDFHKYQSNGLLVYLEYGYGNQLPLPTRKYIQNLLKVNMEGQYGPEWPSEEKVKRREMVAPEARYIFVRQSSNAITTQNIMKQDSRLEFTHEACNEDRLIGFVHYRFVLEEDVPVVYVYELQMESSAQGKGLGKFLMELVELIACKSQMGAVMLTVQKANNLAMAFYKKLRYVISSTSPSRVDPLIGLEKNYEILCKAFESEAKSILEEGN

SEQ ID NO: 54520 - protein, 265 aa, Oryza sativa
MLRLLRGIMKKRLSQNQVGAAAAMSVTGAEMEDVQVEEAADNMQNDDPLSRFLPPPVTAKCSAALQQKINKFLAYKRAGKSFNSEVRNRKDYRNPDFLQHAVRYQEIDQIGTCFSKDVFDPYGYDRSDYYDEIEADMKREVERKELEKKKSGKVDFITGGVQAPISAAIPKVAAAVSAAAAAGAPLVSISGEGVQKEARPNKKSKWDKVDGDIKNPVAPSGLDNLSAAALLTSANVGAGYAAFAQQKRKEAEEKKTSDHKSDRRS

SEQ ID NO: 54521 - protein, 374 aa, Oryza sativa
MATTASFSPPLASPSRWSPPSRRLRLRVRAGSSLKEWGDFEDAVRSRDLPRALRFLQSVDVETPPAAAAAGAAVARVALPVPPGRDWEVLDACIDADDMRLVGRAYQFLADRGVLANFGKCKNIVLEGPREVTPTVLKEMTGLEAIKLAPKKWGLSGNSSYVLIGFLGGVSYLLNQGVDVRANLAAILGLVAADAMFLGGTCVAQISCFWPPYKRRILVHEAGHLLTAYLMGCPIRGVILDPFVALRMGIQGQAGTQFWDEKMEKELAEGHLSSTAFDRYCMILFAGIAAEALVYGEAEGGENDENLFRSLCILLDPPLSVAQMANRARWSVMQSYNLLKWHKKAHRAAVKALESGHSLSTVIRRIEEAISSDR

SEQ ID NO: 54522 - protein, 140 aa, Oryza sativa
MRGEANGEEEQQPPRRQSSAGRRGGGGGGGAEGGEAGFRSAAAAAAAATDGCGGRGGDEEAWGTSGSTASPPPSPASTRSSSRCRSAPPPSLLFLSSPMNLILRVLIAYQALVCVPLLSLCCGLWMCSESAVQAVARSRS

SEQ ID NO: 54523 - protein, 595 aa, Oryza sativa
MPFQHSMPESPTLPLPPPPAAAVSAAAAAGRPPPVTSMERTVRTLDRQISQFVAMDRLIWADSADADAFLEAVDDLIGTVQELEAAGTNRGLFDRAEELLSRCMARLEEEFRALIERPDDAVPAAPGGFRSDGSDDEEDFGGGDGYGDEPIPIAKPVTDYDVVIDALSPGSVANVHQIARRMVDAGFGRECAEVYAAARRGFVDESVARLGVRPRTAEEVHASSWEELEFDIARWIPAFNMVFRILIPSERRLCDRVFDGLAPFGDLAFVAAVRTQALQLISFGDAISSSSRAPERLFRVVDMYEAVRDLLPDLDPVFADPYSAALRAEVTAVCNTLGSSIKGIFMELENLIRRDPARVAAQGGGIHPITRYVMNYLRAACGSRQTLEEVMEGDFGAVGGAAAAVDPDRPTSSLAVHIAWIMDVLHKNLDIKSKIYRDPSLACVFLMNNGKYIIQKVNDSELGVLLGDEWIKQMTNRVRRWSMDYQRVTWGKVTTVLQTGGPGVGGLPATAMKQKLRMFNTYFQEIYEVQSEWVIADEQLRVDVRAAVAEAVMPVYTALISRLKSSPEARHDLYIKYTPEDVEACIQHLFEGAAK

SEQ ID NO: 54524 - protein, 240 aa, Oryza sativa
MEGCNRKFTIKGNIQRHVQEMHKDGSPCESKKEFICPEENCGKTFKYASKLQKHEESHVKLDYSEVICCEPGCMKAFTNLECLKAHNKSCHRHVVCDVCGTKQLKKNFKRHQRMHEGSCVTERVRCHLKDCKLSFSKKSNLDKHVKAVHEQKRPFVCGFSGCGKSFSYKHVRDNHEKSSAHVYVQANFEEIDGERPRQAGGRKRKAIPVESLMRKRVAAPDDDAPACDDGTEYLRWLLSG

SEQ ID NO: 54525 - protein, 211 aa, Oryza sativa
MTRVYMKQKEVEEKWSGNICPKIKQKLEKTAELANTCYTLPAGKGIFQVTDRDHQFIVDINVKCCDCRRWQLTGIPCSHAISCFRNERIQPEDMVSPCYSLESFRAAYKYNIVPSRDQSKWEKMNGVNVQPPKYEKKVGRPKKTRRKQSIELEGGTKLSKHGVVIHCSYCDGAGHNRNNCELLGTTKKMRPKRKRSVQVMQDDKDVYMNEV

SEQ ID NO: 54526 - protein, 214 aa, Oryza sativa
MERSGERRRERVVAAALAVLLLVFASAFVRCRGDADGEGDGAGAAEPGKTGPPLPPGWKGGSGSGQGSSPDGAWRYGWGWAASPGGKGSGFGFGYGGSRGEGGGGGGGGGGGSGRAYGFGGGYGGHPGGFGGGGGGGGGGGGRNYGGGSGGIGGYGNYGGGYNGEPGGGGGGAGEGGGYGGDYGGGDVGANWSKRGSFRGGGGKTQQKDGGGNN

SEQ ID NO: 54527 - protein, 494 aa, Oryza sativa
MQYMTFGINALSGPIPKELGNLTNLISLGFGSNNFSGSLPSELGNLFKLEELYIDSSGLSGALPSSFANLTRMKILWASDNNFTGQIPDYIGSWNLTDLRLQGNSFQGPLPATLSNLVQLTNLRIGDIASGISSSLAFISSMTSLNTLILRNCMISNSLESIDFSKYASLTLLDFSFNNITGPIPQALLNLNSLNYLFLGNNSLTGKLPTSIGRSFRVLDFSYNQLSGYLPSWVSGKDLQLNLVANNFVDNELNNSILPSMQYLNCLQRSTPCFLGSPKTASFAVNCGGPLTSGSDNLRYQSDEVNLGDASYYITGEPTWGVSTVGRFMDASNGGYTIRSSRQFQNTLDSEMFQNTRTSASSLRYYGIGLENGNYTVTLQFAEFGFEDTQSWKSLGRRVFDIYLQGERKEQNFDIRKAAGDKSYTVVKRSYKVPVTKNFVEIHLFWAGKGTCCIPTQDNYGPSISALSLIPAGTPLNNNSWFHFENNVFSVINY

SEQ ID NO: 54528 - protein, 665 aa, Oryza sativa
MFLATRPSGSSSLITRLCVLHTVSWIVSSRQVARFSTGVDNANPGAHCRLSELFRPVRTETSCVIIGRALECGRWSESVELELEGLHVELDPFVVNKVLRGLLDSGMAVRFYWWAESRPGFYHNNFAIAYIISLLFVDDNFALLSEFLGRVRSQGVAFHRSLYRVLLAGYARAGKFDSVIETFDEMVTSGCREFGVDYNRFIGVMIKNCCFDLVEKYYNMALAKGFCLTPFTYSRWITALCQSNRIELVEELLTDMDKFGCFPDFWACNIYVHYLCGHNRLYDALQMVEKMTMKGTGPDVVTYTTVVSCLCDHRRFSEAVGLWEEMVRRGLKPDVVACGALIFGLCKNQKVDEAFELASRMLTLDIQLNVSIYNALISGFWRAGSIEKAYKTVSFMQRNGCEPDVVTYNILLNHYCSIGMTDKAENLIRKMEMSGVNPDRYSYNILLKGLCKAHQLDKAFAFVSDHMEVGGFCDIVSCNILIDAFCRAKKVNSALNLFKEMGYKGIQADAVTYGILINGLFGIGYSNLAEELFDQMLNTKIVPNVNVYNIMLHNLCKVGHFKHAQKIFWQMTQKEVSPDTVTFNTLIYWLGKSSRAVEALDLFKEMRTKGVEPDNLTFRYIISGLLDEGKATLAYEIWEYMMENGIILDRDVSERLISVLKLKNN

SEQ ID NO: 54529 - protein, 156 aa, Oryza sativa; identical to SEQ ID NO: 29689

SEQ ID NO: 54530 - protein, 918 aa, Oryza sativa
MNVATGAMNTLLPKLGELLVGEYKLQKGVKGEIEELEKELTSMTAALHKVAETPADKLDKLAKIWASDVRELSYDIEDAIDTFMIKGKGHELATSFKKVTNLFNKFKTNHQIHGVIKDIMDQVKKVSERRSRYIVDDIAARPTIVDVDPRLEAMYRKATELVGINEPKSELTKRLLEHDYSSRQQSNIISIVGFGGLGKTTLANSLLQELEAKFDCHFFVSVSLKPDINKILKSILPQLDKKRYAHINEAWETKQFIDEIQDFLKNKRFLCVIDDVWEKSAWDDIKLAVQDAKLGSKIIVTTRNMVVAEHAGGGVYEMKPLSNDDSRQLFCKRIFDSNDDCPGDLCGVTEKILKKCGGVPLAIITTACLLASKPRNSEEWDKVNKSISLGLENNLDVDNMRKILSLSYNDLPFHLKTCLLSLSKYPEDELIRKDVLIWGWLAEGFITDETRLAGTSLQEIGESYFSELINRSLIQPMDTYFQYEDGKVHECGVHDMVLELINQLSAEEDFVTTYLSDGQQAGKCTCTTQKKKKIHRLSLHNSNKSYASPEAREQLSKVRSLTIFGKVDSIPPLSSFHVLRVLQIEDCSGMGKNHFSDLGKLRLLRFMRLGCYSATELPESIGKLESLETLDIRGARSRTPYYSFKSPKVVFPMSFVKLRKLLRLFAGEVKLAQGLMLGNMKSLQELEVEATPEVIKEIGYLKELRTLRIIVNSQISETLELVESIQTSIKRLTNLQDLDLRLSGVRETIDMQQIPSGLQRLFMFRLDMEAFPCWINSSMLSRLTALSILLKSEYLQPDHLDRLAKLPSLRFLRLELEGDPFRLKQLTIHRGACAFRSLKYFHLYSYMMPSFQPGAMPHLERLCLLIMTFIVRGDLNDLGLENLHSLRHVTIHSCNDETKAVVKEALKDCPNQAALELY

SEQ ID NO: 54531 - protein, 69 aa, Oryza sativa
MGDEQFGPPSRSQPATVSPARLTALALVRRDQPSHNLEDRNTEDQENTHICYFSHIVHERHSAAAWPPM

SEQ ID NO: 54532 - protein, 500 aa, Oryza sativa
MAGGDQRGDSPSSHELSGRLEGILADGEAPWARRACKAAALEVRLLAPIAAPAIVVYVPNNVLSISTQIFCGHLGNLELAASSLGNNGIQIFAYGLMLGMGSAVETLCGQAYGVHKYDMLGVYMQRSTVLLMATGVPLAVIYAFSRPILVLLGESPEIASAAAVFVYGLVPQIFAYAANFPIQKFLQAQSIVAPSAYTSAATLVLHLVVGWLVVYQLGMGLLGASLVLSLSWWVIVAAQFVYIAASKRCRRTWTGFSWMAFSGLPEFLKLSTASAVMLCLETWYFQILILLAGLLDDPQLALDSLTVCMTLAGWVMMISIGFNAAASVRVGNELGAGHPRAAAFSVVVVTAVSFVITVVMAVVFLMFRDYISYIFTEGETVARAVSDLCPFLAATLILNGIQPVLSGVAVGCGWQKIVAYINVGCYYFVGIPLGFLLGFKFHLGAKGIWTGMLGGTCMQTLILFWITFRTDWNKEVEEAKKRLNQWEDKKQPLLAGTVDY

SEQ ID NO: 54533 - protein, 298 aa, Oryza sativa; identical to SEQ ID NO: 32269

SEQ ID NO: 54534 - protein, 1078 aa, Oryza sativa
MATPATAASDATNPEAAEVPSAAPASESEGPFDSGVVAAATTPAVVDSAVEGDAPAAPAPTSGSGPAAPSMPANPASPATPGPPRPQFAGSPAYASPPAPAFSYNVLPRPSPRPQVGSGAAQQQLASPPAMMAPSVAAAALQPPVPGQYFGNRPSFSYNVVSHANAGLPTGQQFQLDTGTNHAVQVSRFVPPSSLQPPAPMNLARPSSAFPGAGAMPPNPPGSIRLPFPGPPRPSINTFVASPQQAQPQASQLPSNSGSSDVSTSRSDTRSVPEASPQTMQLSTGPPSTSTAGSPSITVQMPTNPSLPTRPEVFGAIGASVPGQPSTILSAPPSLLERPMTPSASPFPQTSQSPTAFQQPGQQQLYPSYPSAHGVQPQPLWGYPPQPTGFQQPPFQSYPSGLLGPLGRPMVGSSSVTAYLPSIQPPGVSTTDRDSKELSSANPGSEQPTQQGSQNSDQLEDKRTTAIQDSDSWSAHKTEAGVVYYYNALTGESTYQKPPGYKGEPEKVAAQPVPVSWDKLAGTDWSIVTTSDGKKYYYDNKLKVSSWQLPPEVAELIKNAESGPLKGSSTSLQDAGTIGNKEEISIDIDTPAVQTGGRDSLPLRQTVAPASSSALDLIKKKLQDAGASSVPSPLATPSSASELNGSKTTDAAPMGHQVSISGEKSKDNSGDGNMSDSSSNSDDEEHGPSEEECTRQFKEMLKERGVLPFSKWEKELPKIVFDPRFKAIPSHSRRRSTFEQYVRTRADEERKEKRAAQRAAVEAYKQLLEEASEDINSNKDYKEFKRKWGTDPRFEALDRKERDALFNEKVKSIEEKVQSVRNAVIAEFKSMLRESKDITSTSRWTKVKENFRSDARYKAMKHEEREVAFNEYIAELKSAEKEAEQAAKAKLDEQAKLKEREREMRKRKEREEQEMERVKLKIRRKEAVSSYQALLVEIIKDPKASWTESKPRLEKDPQGRAVNPDLGKGDAEKLFRDHVKDLYERCVRDFRALLSEVITPEIAARTTDEGKTAINSWTEAKGLLRSDPRYNKLASKDRESIWRRYADDMKTKLKQSDMKERSDTDGKQRRSSDPPRRR

SEQ ID NO: 54535 - protein, 360 aa, Oryza sativa
MAARSSSSPAKTTTTLALLLVVAAAAAAVAAEAAAVAADAARGVRQVNRRGPYLGVVVPNGFEMEPLLRSPAFSPAKKLPYLDVAGRRFRFGSIGEKKVIIVMTGLGMLNSGVTTQLLLTLFDVEGIVHFGIAGNADPDLHIGDVTVPRYWAHTGLWNWQRYGDGPEKELALESNGDYTRKYGALNFSDYGVAGGGGGNLLNGVWYQPEEVFPADGTPESRRHEFWVPVDGRYYQLAQKLEAMPLERCVNRTGTATSPATCLARAPAVARVERGCSASVFVDNAAYRQFLRSRLGVTPIDMESAAVALVAAQQGAPFIAIRSLSDLAGGGSAESNEAGVFAALAAQNAVAVAVKFISLLS

SEQ ID NO: 54536 - protein, 111 aa, Oryza sativa
MTSSEQLMAPETAAATVTTKLLAQEITKDVQVNSRRKFEKWDIAITTLEPNINTMLIAIVPGKERDYNAYSKDYMSSIVKQSCTNTRSCFRDGDIPSKICNYPMILCLRII

SEQ ID NO: 54537 - protein, 803 aa, Oryza sativa
MDAEMAAPALAAAHLLDSPMRPQVSRYYSKKRGSSHSRNGKDDANHDESKNQSPGLPLSRQSLSSSATHTYHTGGFYEIDHEKLPPKSPIHLKSIRVVKVSGYTSLDVTVSFPSLLALRSFFSSSPRSCTGPELDERFVMSSNHAARILRRRVAEEELAGDVMHQDSFWLVKPCLYDFSASSPHDVLTPSPPPATAQAKAPAASSCLLDTLKCDGAGWGVRRRVRYIGRHHDASKEASAASLDGYNTEVSVQEEQQQRLRLRLRLRQRREQEDNKSTSNGKRKREEAESSMDKSRAARKKKAKTYKSPKKVEKRRVVEAKDGDPRRGKDRWSAERYAAAERSLLDIMRSHGACFGAPVMRQALREEARKHIGDTGLLDHLLKHMAGRVPEGSADRFRRRHNADGAMEYWLEPAELAEVRRLAGVSDPYWVPPPGWKPGDDVSAVAGDLLVKKKVEELAEEVDGVKRHIEQLSSNLVQLEKETKSEAERSYSSRKEKYQKLMKANEKLEKQVLSMKDMYEHLVQKKGKLKKEVLSLKDKYKLVLEKNDKLEEQMASLSSSFLSLKEQLLLPRNGDNLNMERERVEVTLGKQEGLVPGEPLYVDGGDRISQQADATVVQVGEKRTARKSSFRICKPQGTFMWPHMASGTSMAISGGGSSSCPVASGPEQLPRSSSCPSIGPGGLPPSSRAPAEVVVASPLDEHVAFRGGFNTPPSASSTNAAAAAKLPPLPSPTSPLQTRALFAAGFTVPALHNFSGLTLRHVDSSSRSSAPCGAREKMVTLFDGDCGGISVVGTELALATPSYC

SEQ ID NO: 54538 - protein, 491 aa, Oryza sativa
MVYDGAVKDQESSANPASASAALSEASAAASEVTAAAAAGAGAGAAEEGAAVSGRPPRPPHDKRLGVRHPLKHRRFRAGGKVMVEPGDPPSAQEVADEEASEVEQEAAPVEREPPQEEGGDVEVSSAPAEMEVVEGDAMEVSPEPAVAVGESELEGRPGEEEEVSSPVVSQGERKQETAAAAPVPAVEEKKHKDQENKHKEREREKERERVDEVGYMSGGWKSEDGFLSCGYSSFRGKRASMEDFYDIKSSKIDDKQISLFGIFDGHGGSRAAEYLKEHLFENLMKHPEFMTNTKLAISETYKKTDSEFLDSESHTHRDDGSTASTAVLVGNHLYVANVGDSRAVISKAGKAIALSEDHKPNRSDERKRIESAGGVVMWAGTWRVGGVLAMSRAFGNRLLKQFVVADPEIQEQEIDDELEFLILASDGLWDVVPNEDAVSLVKIEEEPEAAARKLTETAFSRGSGDNITCIVVKFQHDKMDGDSSPTSDKS

SEQ ID NO: 54539 - protein, 764 aa, Oryza sativa
MWRHGERCVILAVAAVALVAAATATAAAAVGGERRTYIVHMSRSAKPNDFVEHGEWYAASLQSVSDAATVLYTYDTIVHGYSARLTRAEAEALESQPGVLLVNPEVRYELHTTRTPEFLGLDRTDALFPQSNTGSDVIVGVLDTGVWPERPSYDDAGLGPVPAGWKGKCEEGNDFNASACNKKLIGARFFLTGYEAAKGPVDTSKESRSPRDNDGHGTHTSSTAAGSAVRGADLLGYAAGTAKGMAPHARVATYKVCWVGGCFSSDILKAMEVAVNDGVDVLSLSLGGGTADYYRDSIAVGAYSAMERGIFVSCSAGNAGPGSATLSNGAPWITTVGAGTLDRDFPAHVVLGNGKNYSGVSLYSGKQLPTTPVPFIYAGNASNSSMGALCMSGSLIPEKVAGKIVLCDRGTNARVQKGFVVKDAGGAGMVLANTAANGEELVADAHVLPGAGVGQKAGDTMRAYALSDPNPTASIVFAGTQVGIQPSPVVAAFSSRGPNTVTPGILKPDLIAPGVNILAAWSGSVGPSGLAGDSRRVGFNIISGTSMSCPHVSGLAALLRAAHQDWSPAAIRSALMTTSYNGYPNGNGILDVATGLPATPLDVGAGHVDPSKAVDPGLVYDIAAADYVDFLCAISYGPMQIAALTKHTTDACSGNRTYAVTALNYPSFSVTFPATGGTEKHTRTVTNVGQPGTYKVTASAAAGSTPVTVSVEPSTLTFTKSGEKQSYTVSFAAAAMPSGTNGFGRLVWSSDHHVVSSPIAVTWT

SEQ ID NO: 54540 - protein, 481 aa, Oryza sativa
MATSGPARGWLPALARRIASVTGTLNPPASRVSRFPGSRNMASGSGVEGEGLGIPYRRRFIPFANDPIHTTKDNIISMDKHLPITQGKDSAATKEFISCYGHCRPTTYGDEDASRTAVEVTGGKQDPRGAVQNLIDGEVAVQELIDGEEIARNQRASEVSDNDGYEEFNDRAVNYHCDCHVWTPLIASSHRDGSIYDTRGTFGSGWKWDYRIADRNETRLEAMMLSHPTKDCYMRDGTCIWHPANGMLQIFSVKLAKTPVVDGSIELYGYIAVRDLQDPLLNYIVKIGRDDPIIVEQGSLIEMTGPKRGIDFSCAVLVEYDMRIKTGEREEDDLQLIDGATDLDHILTSHVPVRNRIYGDCGAVDITQANLLYAFEATVEVVISEVQTSFDLCLSCFTSGLHEEIRLFDGAISESRDLRRYVIAVMEHECMDLKFKVGLGSGCFAEHCRSFKATNHGCASEQIKIEFASISVKVTWSAMEF

SEQ ID NO: 54541 - protein, 361 aa, Oryza sativa
MGITEEQRRRIEANRLAALERRKRFAEAAAADASVGWRLAKCPRFAPPPPQPTLPPPPPRTLPPPPPPPPPQPPVGFKVVLEVCGPEDFSVAVGPAEGFAYPGEAECLRAVQDCISSAAPFSTTQSQSGHIFSVFKLMDYEPVLKCLKKLPGVAVQDIPYKTRNVIKNLPKFFAESCASDKEVDGLLMKLPQHLRDALLPFQLEGVKFGLRRHGRCLIADEMGLGKTLQAIAIACCYKDEGPVLIVCPAVLRYTWAEELERWDPSFLPKDIHLVFGHQDSLERLGACPKAVVISYQMLSRLRKSMMNRRWALMIIDESHNIRCTKKKHEKNEVFKLLACHATILCINTINIKYSALEFSNP

SEQ ID NO: 54542 - protein, 96 aa, Oryza sativa
MVMLPSMYPLVFLPANTSINVVFPAPLTPIRAVSTPGLNEPLMPFNSSNRLSVTPCALITYKFHWILKPVRVALKYYRYRRIFILSMHISDIFIFQ

SEQ ID NO: 54543 - protein, 173 aa, Oryza sativa
MRDVGTPAGRDHSSSGSASTSAQAKKPASTNAEEPSSPTRGGQQQDSRRLRTLSDPELDLLITLKDLAMVCTENASLAVLGHDYDLPTLRALGIVLLETLKERLKETSIDPSVFDRLALLSDSDAYFPSIASDSESEGVRSKTPMGANGKRKQTQAGWLSEEGRKKRTPASQR

SEQ ID NO: 54544 - protein, 221 aa, Oryza sativa
MRSPAAAEFSDALPSPTSPAATPSHPSSGRHFYLAVDRLQFKMRTLLELLGVVADRRGALPIAVGVSSRDELDLVCADVASLPFVSLSPLYSDQAESERASVLDKFRQATIQWNHTKAAAADIADSPKTESADSKLTIVVATDACLPQATLGEAPLMARVLINYELPTKKEAYFRRMSTCLAADGIVINMVVGGEVATLKALEETSGLLIAEMPIHVSEIL

SEQ ID NO: 54545 - protein, 186 aa, Oryza sativa
MAEVADLTGDGGVLKTVVRKAKDDAIAPTDSLPLVDVHYEGTLAENGEVFDTTHEDNSIFSFEIGQGAVIKAWDIALRTMKVGEVAKITCKPEYAYGSAGSPPEIPPNATLIFEVELVACRPRKGSSLGGVSDEKARLEELKKQRELAAATKEEEKKKREEAKAAAAARVQAKLDAKKGKGKGKGK

SEQ ID NO: 54546 - protein, 210 aa, Oryza sativa
MSPVPSPHQSHHLGHGSRKEKRMRKVDTFAPHNDGHQWRKYGEKKINNCNFPRYYYRCTYKDNMNCPATKQIQQKDYSDPPLYSVTYYNEHTCNSAFLPLSPSEFQLQTASGKAVSICFESSGAQEPMTNASSPSSSAARRSTPSENKNQPLPRHSEAYSWGVGVVEQKPSCTELQSCSTECQDAFSAGTIPEETVDAGRFGSIRFFHFL

SEQ ID NO: 54547 - protein, 101 aa, Oryza sativa
MVVAGGSGAAAAAAAGVELRGDARHAAVQGEAAGERRLQQLLRVLAPWPRAAVRPVPAAQRHWSRGPRQPMNSIHVEREREREREREREREREREREIRVA

SEQ ID NO: 54548 - protein, 310 aa, Oryza sativa
MASFRLMIAAVSLSLVQLSMGSRRLMELYIPPASDQLTYHHGSVLSGDIPVSILWYGKFTPTQMSIIADFVVSLTGAPNAATPSVGQWWGTIEQLYLSNAATNSQTSTRVLLDEQVSDEQCSLGKSLTLAQIDQLAARVGTKRGGVALVFTDEDVTVEGFCSSRCDKHGSDASAGTTHIWVGNSAKQCPGQCAWPFAQPVYGPQGTPLVAPNNDVGADGMVMILASMVAGTVTNPYGDGFYQGPQDAPLEACSACGESTAAARTRGTPVNSSSTPPPEPATTPTARTGGSTCSRRCTIPQRPPATRLCNP

SEQ ID NO: 54549 - protein, 398 aa, Oryza sativa
MDPEDLTDSEEDEDDDMMFFILPTLYLVSTGSEEPCHTSKFSGAEWICEVLEDDRGEGYAKFRMEPQILQKFSDLLRSKNLLRNTRGVSVEEQIGMFIYMLSRNASFQKMSDRFEHSRETIHRHIKACFDAITSLTDEFVKHPSTETHWKISSDPQYGPYFKNCIGAIDGVHVPITISDYEAAPYRNIEDSLSQNVMLACDFDLNFVHVCSGHEGSASDAAVLYAAVESGFEVPSNKYYLVDRGYANTPSFLAPYREAAYHIEEEEQSNCQPSDYKELFNLRHSKLRNNIKRATALLKMRFPILNVATFYQIETQAKIPAAAVVLHNIMQGQKDDDDDDGWAFNQAMPVSSRRTVVLPSGDDAYGNDVEELNNQCSMGDALRDYIAKKMWTDYERNRR

SEQ ID NO: 54550 - protein, 54 aa, Oryza sativa
MFHSNKRLQQLFIEVHSSSRAMYNDLGFDKVIFNLSELISHNYIFISYWPEHCQ

SEQ ID NO: 54551 - protein, 224 aa, Oryza sativa
MRWPRPISPGRRLLPVVVLFVALCSIPGIFSQRLVTLDSIDIFTTHEWFPSKPTVYFLCDGEDKVYLPDVKDANNIYTFKGEESWQPLTELPEKKCKRCGLYEEDTFKHDLYDEWELCSSDFKKGKYTHFKEGQFNATFLCPNCTASAGDSANHDSSSEVETKKSSVTVIIIVSVLSSVLVIIALFGGYKYWLKKKRERDQLRFLKLFEEGDDIEDELGLGNEL

SEQ ID NO: 54552 - protein, 491 aa, Oryza sativa
MAIKDEQQPLHILFFPFLAPGHLIPIADMAALFAARGVRCTILTTPVNAAVIRSAVDRANDSFRRNNGGLAIELTVVPFPDVGLPPGFESGTALTTQDDRDKFFLGIRLLHEPFDRYLSEHHVDAAVVDSFFRWAADAAAEHGVPRLGFLGTSVFARACTNSMLRNNPLETAPDDPDAVVPLPGLPHCVELRRSQMMDPKKRPDHWEKFQSLDAADQRSFGEVFNSFHELEPDYVEHYRTTLGRRVWLVGPVALANKDVAVRGTSELSPDADGYLRWLDAKPRGSVVYVSFGTLSSFSPAEMRELARGLDLSGKNFVWVINGADADASEWMPEGFAELIAPRGERGLTIRGWAPQMLILNHPAVGGFVTHCGWNSTLEAVTAGVPMVTWPRYADQFYNEKLITEVLEVGVGVGSMDFASKLENRRVIIGGEVVAGAIGRVMGDGEEGEAIRKKATELGVKARGALEKGGSSYDDVGILMDELMARRGSVNV

SEQ ID NO: 54553 - protein, 493 aa, Oryza sativa; identical to SEQ ID NO: 33555

SEQ ID NO: 54554 - protein, 329 aa, Oryza sativa
MDAMRKQLDVLMGANRNGDVREVSRKYYDRDVCRLFLAGLCPHDLFQLTKMDLGPCPKVHSLQLRKDYEEVKAKGTENYDRELEEMIDRLIVECERKIQRALKRLADEDAKAAIAISVSEVTQTDEVLQLSKEIKEKMKEVDTYDFEGKTDDKIKTMEVVEELRSKRADMQATLLLDAFNKDRASLPQPTPTPQMASVPAPAPPDARTQEMINEKIKKAEELGEQGMVDEAQKVMEEAEALKKLAARREPTSDPTKYTAADVRITDQKLRLCDICGAFLSVYDNDRRLADHFGGKLHLGYMLIREKLKELQVHSCIPDLPQVKFLGNDN

SEQ ID NO: 54555 - protein, 446 aa, Oryza sativa
MGMMNNCWFKVKVNVCRPHKGEIGLVFEHPTQPGNQTGGWMARQKHLETAEAAAPGLKRSTSTPFMNTTDGKQFTMSEVRKHSSQDSAWIVVHGHVYDCTAFLKDHPGGADSILINAGTDCTEEFDAIHSDKAKALLDTYRIGELITTGAGYSSDNSVHGASNLSQLAPIREAIKAPAPVALSSPRDKVPCQLVDKKELSRDVRLFRFALPSSDQVLGLPVGKHIFVCASIEGKLCMRAYTPTSMVDEVGHFDLLIKVYFKNEHPKFPDGGLMTQYLDSLPVGAYIDVKGPLGHVEYTGRGEFVINGKPRNARRLAMIAGGSGITPMYQVIQSVLRDQPEDTTEMHLVYANRTEDDILLRDELDRWAAEYPDRLKVWYVIDQVKRPEEGWKYGVGFVTEEVLREHVPEGGDDTLALACGPPPMIKFAVSPNLEKMKYDMANSFIVF

SEQ ID NO: 54556 - protein, 179 aa, Oryza sativa
MALLRSLACFLFLLCSSFTFEAVNGRMYGGGDVVEEEEDDSSTVADGARGGAGGWPGYLYTRAVGRCTPQFWSSGAEQWPNIIPQEAAVSKVFGSRSIDRYGPRLTVLEATTRTDDNGSSSAFAKLVKQGSAALLNAYARKGFPLDSWEVKALLLEALVSEDAAAAQADRFEQANESCI

SEQ ID NO: 54557 - protein, 158 aa, Oryza sativa
MAEKLGPEKRHAFVHNGQKVFEWDQTLEEVNMYIELPKGVPTKLFHCAIQATHVEVGIRGNPPYLNHDLTLPVKTDSSFWTIEDGEMHITLQKREKGKTWSSPIQGQGSLDPYAADQEQKRLMLQRFQEENPGFDFSQAQFTGTCPDPRTFMGGIRSD

SEQ ID NO: 54558 - protein, 361 aa, Oryza sativa
MQAMRAVDDKECYSHSIHGESNGRPQRKNNPASRPKPTPSKWDDAQKWLVSLSNGGGGGVDGIHSGKVRPRNSNADDRRLLSSSSQNGRVSCSSVDGALEYNLVAAPPTPPQLGEAAADDVSETKKIDYCMVQPQHGSPAAVLRSVCLRDMGTEMTPIASKEPSRSATPLRASTPVSRSPVPSRPSTPGRRRYDVAVGVTAVVESRTAEPVAVGSVSDGGGFGGGCAVDESSSGGFGNHAQSTTTGLESRAVAWDEAERAKFTARYKREEMKIQAWENHEKRKAELEMKKIEMKAEQMKARAHEKLANKLAAARRMAEEKRATAEAKLNEHAARTTQKADYIRRTGHLPSFFSFKMPSLCG

SEQ ID NO: 54559 - protein, 102 aa, Oryza sativa
MCRRCSDGGFGLGDVPRWQGVPSESLAQFFGPTVTSPSDVVTLLRALLRYPSSLGKELWVKTLSSLWIDDDGVFWRRDPREGVILESSCRSGVVSSVAIGLA

SEQ ID NO: 54560 - protein, 256 aa, Oryza sativa
MDPTSVPWSSMVYGLLGLALLWQVHRLLVRLWWQPRRLERALRAQGVRGTSYRFLTGDLKDYGRLSKEAWARPLPLRCHDIAPRVAPFVHRTIAEHGKACLSWFGPIPKVTIADAEIAKDVLSNKMGHFEKLKFPVLSKLLADGVANYEGEKWAKHRRILNPAFHLEKLKLMLPAFSACCEELVGRWAASLGSDGSNEIDVWPEMQSLTGDVISRTAFGSSYLEGRRIFQLQAEQQELFMGAIQKISIPGYMSLPT

SEQ ID NO: 54561 - protein, 354 aa, Oryza sativa
MPEGGIPACFRGAPGGGAGGGGGGGVGVAGQSSGGVGTSLATSVYETRLGVAALSWSRAALGLSLRVVLRVAGGAGAGAWAAASSSAASDYGCYDEGAGARVDARRGARPRPQDLRQRPRQGTGDLGGSRVARPRQGQGQGQGQGEGQGRRRHVGHRRRRARAPHPAPALEVPRHREGRPRRRRRRPGLLGPPPLALPQPRHGPRRRLRGHPASPARPRRLHLPLRARRHRRRRPRLCRGQGRAPPRKRRERRRRRRVGRLPREVGARGLEREQQQRGEPEEEGASPEAGQGELVVIGVGGFLLRVVGERLDGDGLGEPRGGRAAARPWLLPPRLRLEMLAIGAEQSILSIDDD

SEQ ID NO: 54562 - protein, 340 aa, Oryza sativa
MNDLWVKHCGISHTGSFKDLGMTVLVSQVNRLRRAPLSRPIAGVGCASTGDTSAALSAYCAAAGIPAIVFLPANRISLEQLIQPIANGATVLSLDTDFDGCMRLIREVTAELPIYLANSLNSLRLEGQKTAAIEILQQFDWEVPDWVIVPGGNLGNIYAFYKGFEMCRVLGLVDRVPRLVCAQAANANPLYRYYKSGWTEFTPQVAEPTFASAIQIGDPVSVDRAVVALKATDGIVEEATEEELMNAMSLADRTGMFACPHTGVALAALFKLRDQRIIGPNDRTVVVSTAHGLKFSQSKIDYHDSKIEDMACKYANPPVSVKADFGAVMDVLKKRLKGKL

SEQ ID NO: 54563 - protein, 469 aa, Oryza sativa
MVLVAIGVVVAAAVVVSSLLLRWNEVRYSRKRGLPPGTMGWPLFGETTEFLKQGPSFMKARRLRYGSVFRTHILGCPTVVCMEAELNRRALASEGRGFVPGYPQSMLDILGRNNIAAVQGPLHRAMRGTMLSLVRPAMIRSSLLPKIDAFMRSHLAAWSSSSSSAVVDIQAKTKEMALLSALRQIAGVSAGPLSDALKAELYTLVLGTISLPINLPGTNYYQGFKARKKLVAMLEQMIAERRSSGQVHDDMLDALLTGVEGTREKLTDEQIIDLIITLIYSGYETMSTTSMMAVKYLSDHPKALEQLRKEHFDIRKGKAPEDAIDWNDFKSMTFTRAVIFETLRLATVVNGLLRKTTQDVEMNGYVIPKGWRIYVYTREINYDPFLYPDPMTFNPWRWLEKNMESHPHFMLFGGGSRMCPGKEVGTVEIATFLHYFVTQYRWEEEGNNTILEFPRVEAPNGLHIRVQDY

SEQ ID NO: 54564 - protein, 522 aa, Oryza sativa
MANRRKFSQAGGGGGGGVFDPFGTKQAVSSLRKGGRLPVYVAGVFFVIFVIIMYGEDIRSLTLDPIARAGTTPARIVEPVVTEERHVARVNPPRREVSSAEKAAALPLDVDERPKLATPTPTEAAKEVPKVEKIRKPKKPKTTKKKPRKPRPAKKTVAAAAGGLLGVPETCDLSKGEWVFDNTSYPLYREEQCEFLTSQVTCMRNGRRDDTYQKWRWQPKDCSMPRFDAKLFMERLRGKRFMFVGDSLNRNQWESMVCLVQSAMSPGKKYVTWEDQRVVFHAVEYNATVEFYWAPFLVESNSDDPKIHSIQHRIIKADAIAAHAQNWRGVDYLVFNTYIWWMNTLNMKIMRPGGQSWEEHDEVVRIEAYRKVLTTWASWVNDNIDPARTSVFFMSISPLHISPEVWGNPGGIRCAKETMPLLNWHGPIWLGTDWDMFHAAANVSRTAATRVPITFVDVTTMSERRKDGHTSVHTIRQGKVLTPEQQADPGTYADCIHWCLPGVPDIWNLILYTRIMSRPQLV

SEQ ID NO: 54565 - protein, 71 aa, Oryza sativa
MMEKVFSMVDTLHPEKWNWMLELKQTLILIMRYITMSWDLISPKIYYAGKILNTLSIPLVHRSQRMESTSY

SEQ ID NO: 54566 - protein, 712 aa, Oryza sativa
MSDPGEPSKHSQWMSHWTKGSSSAEPQVGRSNDSPEDAKYDICEDNSGPSNFEIMKSRLFERLMVGISQERASLEHGQKLNSNMKVVVKDARRHAVQNQIDQGDGPIQKSVMQKDVLYAKAVVSKSLSIQKLSELSVDCQKLAGSDDLSSEWNHFPMLAINRKIDSILNPKRKSAKSTGPNDVFVPKQSLKLNMTTANLMAFSSQEYELHSHRTTDETMDHCKHAGGIVSRLEDHAGVMLNPAEQKLKGQLLPATSCSCSKDDSNSSDSLLDEQHTSRYIADSDQEPTCRSREKRLKSSENNDTNCKIGSCSQNQKSRAPGHHKHKGSAGVMFRTSVPGKEFEAAEINCSDKINQRHLNTQRIVSAANVTGSCIPDPAADISTVNGRGEAVTQPSSISGDSTKRKAPYLFEMLTIPSKAQNMNPEDSLPSGNSTAFGVHMYGTNIGSHLFGANNKSSTETEILSGDSQHVSKSSAGIASLLAQEAKSEQLATLYMKGASGCNVNEHQGVSSKAIVANKQQCYNPRTARMDLDLMQFQLSRMRNQESQARTEPGDRWLKRLQIDSKDPHHLPCSKRSKAGDGSGRPVTGGASSMAPRCDGSNDDDDIVDRDHKEEQGLDEGVEIQGGREASPVPAKSDDRWIGRWCQGGVPVYHEDDHDQREEVTKPDLAAGDSGGLEGQFPSIKAMAMMGRAMSKVRPCQEERRGSFMVWKA

SEQ ID NO: 54567 - protein, 152 aa, Oryza sativa
MVRPPCCDKDGVKKGPWTPEEDLVLVSYVQEHGPGNWRAVPTRTGLMRCSKSCRLRWTNYLRPGIKRGNFTDQEEKLIVHLQALLGNRWAAIASYLPERTDNDIKNYWNTHLKRKLQGGDETQLSAIESWLFADADGIESGSLLDAAMDYTF

SEQ ID NO: 54568 - protein, 851 aa, Oryza sativa
MDGDGEWVWVRRPAEAEAVAAAAGWPTAEEEARPLEVVFASPSRYFTDAAPIGNGSLGALVWGGVASEKLQLNHDTLWTGGPGNYTNPKAPAVLSKVRDLVNRGQYAKATAVAYGLSGDQTQVYQPLGDIDLAFDEHVEDTNYKRNLDLRTATVNVSYTIGEVVHSREHFSSNPHQVIVTKISADKPGNVSFTVSLTTPLNHQIRVTNANEIIMEGYCPGERPTEYGNASDHPVGIKFSAILYLQMSGSNGTVEILNDKMLKLVGADSAVLLLAAATSFEGPFVNPSESKLDPTASALTTLTVARNMSYSQLKAYHVDDYQNLFQRVSLQLSRDSNDALGGNGLVNLPENSLQETSVSDYAVQMVECSRFQGFNNSGKPTVDRILSFRDDEDPSLVELLFQFGRYLLISCSRPGTQISNLQGIWNDETSPPWDAAPHPNINLQMNYWPALPCNLSECQEPLFDFIGSLSVNGAKTAKVNYEASGWVSHQVTDLWAKTSPDAGDPMWALWQMGGPWLATHLWEHYSYTMDKQFLEKTAYPLLEGSASFLLDWLIEGNGDYLETNPSTSPEHYFIAPDGRKACVSYSTTMDMSIIREVFSAVLMSSDILGKSDSDMVQRIKKAIPRLPPIKVARDGTIMEWAQDFQDPEVHHRHVSHLFGLYPGHTMSLEKTPDLCKAVANSLYKRGDEGPGWSTSWKMALWAHLHNSEHAYKMILQLITLVDPKHEVEKEGGLYCNLFTAHPPFQIDANFGFPAALSEMLVQSTGSDLYLLPALPRDKWPQGCVKGLKARGGVTINIRWEEGSLHEALLWSSSSQNSRIKLHYGDQVGTISVSPCQVYRFSKDLKCLKTWAL

SEQ ID NO: 54569 - protein, 1066 aa, Oryza sativa
MAGNDWINSYLEAILDAGGAAGEISAAAGGGGDGAAATGEKRDKSSLMLRERGRFSPARYFVEEVISGFDETDLYKTWVRTAAMRSPQERNTRLENMSWRIWNLARKKKQIEGEEASRLAKQRLEREKARRYAAADMSEDLSEGEKGENINESSSTHDESTRGRMPRIGSTDAIEAWASQHKDKKLYIVLISIHGLIRGENMELGRDSDTGGQVKYVVELARALGSTPGVYRVDLLTRQISAPDVDWSYGEPTEMLSPRNSENFGHDMGESSGAYIVRIPFGPRDKYIPKEHLWPHIQEFVDGALVHIMQMSKVLGEQVGSGQLVWPVVIHGHYADAGDSAALLSGALNVPMIFTGHSLGRDKLEQLLKQGRQTRDEINTIYKIMRRIEAEELCLDASEIIITSTRQEIEQQWGLYDGFDLTMARKLRARIKRGVSCYGRYMPRMIAVPPGMEFSHIVPHDVDQDGEEANEDGSGSTDPPIWADIMRFFSNPRKPMILALARPDPKKNITTLVKAFGEHRELRNLASLTLIMGNRDVIDEMSSTNSAVLTSILKLIDKYDLYGQVAYPKHHKQSEVPDIYRLAARTKGVFINCAFIEPFGLTLIEAAAYGLPMVTTRNGGPVDIHRVLDNGILVDPHNQNEIAEALYKLVSDKQLWAQCRQNGLKNIHQFSWPEHCKNYLSRVGTLKPRHPRWQKSDDATEVSEADSPGDSLRDVHDISLNLKLSLDSEKSSTKENSVRRNLEDAVQKLSRGVSANRKTESVENMEATTGNKWPSLRRRKHIVVIAIDSVQDANLVEIIKNIFVASSNERLSGSVGFVLSTSRAISEVHSLLTSGGIEATDFDAFICNSGSDLCYPSSNSEDMLSPAELPFMIDLDYHTQIEYRWGGEGLRKTLICWAAGKSEGGQVVLVEDEECSSTYCISFRVKNAEAVPPVKELRKTMRIQALRCHVLYSHDGSKLNVIPVLASRSQALRYLYIRWGVELSNMTVVVGESGDTDYEGLLGGVHKTIILKGSFNAVPNQVHAARSYSLQDVISFDKPGITSIEGYGPDNLKSALQQFGILKDNV

SEQ ID NO: 54570 - protein, 655 aa, Oryza sativa
MASSGLAYPDRFYAAAAYAGFGAGGATSSSAISRFQNDVALLLYGLYQQATVGPCNVPKPRAWNPVEQSKWTSWHGLGSMPSAEAMRLFVKILEEEDPGWYSRVPEFNAEPVVDIEMHKPKEDPKVILASTNGTSVPEPKTISENGSSVETQDKVVILEGLSAVSVHEEWTPLSVNGQRPKPRYEHGATVVQDKMYIFGGNHNGRYLSDLQALDLKSLTWSKIDAKFQAGSTDSSKSAQVSSCAGHSLISWGNKFFSVAGHTKDPSENITVKEFDPHTCTWSIVKTYGKPPVSRGGQSVTLVGTTLVLFGGEDAKRCLLNDLHILDLETVTWDDVDAIGTPPPRSDHAAACHADRYLLIFGGGSHATCFNDLHVLDLQTMEWSRPKQQGLAPSPRAGHAGATVGENWYIVGGGNNKSGVSETLVLNMSTLTWSVVSSVEGRVPLASEGMTLVHSNYNGDDYLISFGGYNGRYSNEVFALKLTLKSDLQSKTKEHASDGTSSVLEPEVELSHDGKIREIAMDSADSDLKDDANELLVALKAEKEELEAALNREQVQTIQLKEEIAEAEARNAELTKELQTVRGQLAAEQSRCFKLEVDVAELRQKLQSMDALEREVELLRRQKAASEQAALEAKQRQSSSGMWGWLVGTPPDKSES

SEQ ID NO: 54571 - protein, 481 aa, Oryza sativa; identical to SEQ ID NO: 29923

SEQ ID NO: 54572 - protein, 596 aa, Oryza sativa
MPTVSVGRDRFFVALGRTYTQEEFEVLCFEFGIELDDVTTEKAIIRKEKHLEDDDGEVDGDDDEVIYKIEVAANRYDLLCLEGLARALRIFTGTEATPMYKISCIPRDSMLLMHVKPQTSQIRPYVVCAVLRGVTFDEARYNSFIDLQDKLHQNICRKRTLVAIGTHDLDTLKGPFSYEALPPQEINFVPLKQEESFRADKLMEFYKSDMKLKKFLHIIENSPVYPVIYDSNRTVLSLPPIINGAHSAITLKTRNVFIECTATDLTKAKIVLNTMVTMFSEYCENKFEVEPVEVVSHDGSKTIYPDLSCYKMEVSLSEVVGPIGISLDETKVISLLNKMQLQAESCPSKGEPRISVSVPPTRSDILHARDLVEDVAIAYGYNNVPKSKPKCMTIGGRQPLNRFSDKLRAEVARAGYMEVLTFTLCSREENFDMLNRTQDVNKAVIIANPRTSEFEVVRTSLMSCLLKTLKHNIDHPRPIKIFEVGDVVTLDGSRDVGASNNRRLAALYCNKQSGFEEIMGLVDRIVNVVRAPHIKFGQNYYVPTNEPEFFPKRQCKIVMSDGKQIGYLGIVHAEVLRKFGIPDPCTFVEIDVEALL

SEQ ID NO: 54573 - protein, 290 aa, Oryza sativa; identical to SEQ ID NO: 31197

SEQ ID NO: 54574 - protein, 395 aa, Oryza sativa
MAPPPASSLPTAVLAWGSGEDGQLGMGGYEEEDWARGVAALDALAVSAVVAGSRNSLAICADGRLFTWGWNQRGTLGHPPETKTESSPAPVDALAGVSIVQAAIGGWHCLAVDDKGRAYAWGGNEYGQCGEEAERKEDGTRALRMDIPIPQGCAPKLKVRQVAAGGTHSVVLTQDGHVWTWGQPWPPGDIKQISTPVRVQGLENVKVIAVGAFHNLALTEDGILWAWGNNEYGQLGTGDTQPRSQPIRVEGLSDLSLVDIAAGGWHSTALTKEGEVYAWGRGEHGRLGFGDDKSSHMVPQKVELLAGEDIIQVSCGGTHSVALTRDGRMFSYGRGDHGRLGYGRKVTTGHPMEVPIDLPPPGTSGGDSGGQWQARYVACGGRHTLAIATWTEADE

SEQ ID NO: 54575 - protein, 413 aa, Oryza sativa
MQAAAGRARRLLTSPAASGILSAPRPGCAALAGSGALLPRLDGVPSSPSPSQAPPLLARSFSATSSSRLPRNLLSPSISSQWRNEKSVCYHMAATHYSTEASDIDQPTEAVVELYQKMLKSVEAETMPPNAWLWSMISSCSNKEDIKLLIQILQKLRVFRLSNLRIDANFNDHLCMKVAEACARVGALDYGLKVLWKHNVYGITPTIGSAHYLLKHAKEKNDTKLMGSIMQVLQRNSMPLQPGTADIVFSICYNADRWDLLSKYARRFVKSEVKLHGASFDIWMDFAAKVGDSQSIWNINSLRGKSVKRYNLATGFACVKGFLLERKPESAAAMIKLLHKHSPDEKKQLVTDELQKLVAEWPAEVIKRQKKDDRKALEEALITDIPQMISSMSKLRLDISVNLEKLTSQPETA

SEQ ID NO: 54576 - protein, 385 aa, Oryza sativa
MAEGEGEGGEKKSQRRRLRAACLPRPGCFTVSAADEGPSGSGGGGGGSRPAPTHLVVTVNGIVGSAENWRYAAKHFIKKHPEDVVVHCSGCNGAVRTFDGVDVMGTRLAEEVLSLVQRRPELQKISFVAHSLGGLIARYAIALLYKSATEIDSHEEHEKQITDVSSNQLIDRGKIAGLEPINFITFATPHLGTRSHKQIPLLRGSYKLEKMAYRISWIAGRSGKHLFLKDIEDGKPPLLLQMVTDYGDLHFMSALRSFKRRVAYSNICNDFIVGWRTSSIRHQHELPKPQNFINHVKYPHVVYVEKPKVQDTDFSDSMIYQAKNTSEMEELMLKGLNRIPWERVDVSFKKSRQRIFAHSTIQVKTYFFNSDGADVIFHMIDHFLY

SEQ ID NO: 54577 - protein, 304 aa, Oryza sativa
MLMLLRQMEDHRAHTTPNYDFFSGDYQMKQLGHKMYDQDSPSSDSGQSHQEESAMNDSSPNERHTSTQSDNDDGHQMPDQDKTKSVSSLGNPGALPPKLNYSQSFACIPYTADAYYGGVLTGYSSHAIVHPQQNGTANSRVPLPVEPAAEEPIFVNAKQYHAILRRRQIRAKLEAQNKLVKGRKPYLHESRHRHAMKRARGSGGRFLNTKQLEEQKQQQEEEAASGGASSGNRTCLQNGTGSAPSASSPSEIASVSTSREFLGNHEQSHFPSAGFLPTMSFRAQNGGDGKLVANAIHQRVSMMR

SEQ ID NO: 54578 - protein, 488 aa, Oryza sativa
MAVQAGTPATPISPQVISGAFVQQYYHILHETPDQVYKFYQDASIVGRPDSNGVMKYVSTTADINKIILSMDFSNYLTEIETADAQLSHQDGVLIVVTGSLTSEGICRRFTQSFFLAPQESGGYVVLNDIFRFIVERPPVAISQVSQENENNQNTATLPETDPNPAGDGMISEPVAVENNVAEGEVTNSTVDGTSIENNATAAVEPPVQMTKEEPRKISVAAPPPPAQKDVTKKSYASIVKVMKEVSLTPVVKPKPAPKHVVKTVEASEKPSVKSSQTVEITPNDNNDAENNTSNDEQGYSVFVKSLPHNVTVQTVEEEFKKFGAIKPGGIQVRNNKIDRFCFGFIEFESQQSMQAAIEASPIHMGGKEVFVEEKRTTTRVVNGVVITRGDNGNAGGGGRYQSGRGGYRGDNFRGRGGGYANSGNYRGGDNFSRRNDLRNRNEFSGRGRGPPPGNGYQNNGFHPARPFQNGNGRFTRVNGPRQTPVAA

SEQ ID NO: 54579 - protein, 870 aa, Oryza sativa
MDLAINPFSSGTRLRDMIRAIRACKTAAEERAVVRRECAAIRAAISEGDQDYRHRNMAKLMFIHMLGYPTHFGQMECLKLIAAAGFPEKRIGYLGLMLLLDERQEVLMLVTNSLKQDLNHSNQFIVGLALCALGNICSAEMARDLSPEVERLLQSREPNTKKKAALCSIRIVRKVPDLAENFMGSAVSLLKEKHHGVLISAVQLCAELCKASKEALEYLRKNCLDGLVRILRDVSNSSYAPEYDIAGITDPFLHIRVLKLMRILGQGDADCSEFVNDILAQVATKTESNKNAGNAILYECVETIMGIEATSGLRVLAINILGRFLSNRDNNIRYVALNMLMKAMEVDTQAVQRHRATILECVKDADVSIRKRALELVYLLVNDANAKSLTKELVDYLEVSDQDFKDDLTAKICSIVEKFSQDKLWYLDQMFKVLSLAGNYVKDDVWHALIVLISNASELQGYSVRSLYKALLACGEQESLVRVAVWCIGEYGEMLVNNVGMLDIEEPITVTESDAVDAVEVSLKRYSADVTTRAMCLVSLLKLSSRFPPTSERIKEIVAQNKGNTVLELQQRSIEFNSIIQRHQSIKSSLLERMPVIDEASYLAKRAASTQATISSDKLAAAATPGSSLKLPNGVAKPPPAPLADLLDLSSDDAPATTSAPTTAPNDFLQDLLGIGLTDTSTAGGAPSASTDILMDLLSIGSSPVQNGPPTVSNFSLPGQAETKVAPVTPQVVDLLDGLSSSTSLSDENTAYPPITAFQSAALKITFNFKKQSGKPQETTIHASFTNLTSNTFTDFIFQAAVPKFIQLRLDPASSNTLPASGNDSVTQSLSVTNNQHGQKPLAMRIRITYKVNGEDRLEQGQINNFPAGL

SEQ ID NO: 54580 - protein, 194 aa, Oryza sativa
MESSVRRVQQRVRKAREEMDRWDDLNSRLLSQFANAAAIVARLPVLEEVKNYGVLRCVPNIRENLLGKQMESLEIIFVSMRETVEEFNSIARSLHKALRDTNQMVRGGSALSAKQMQLQVGILPTIADCLDGLRTLCEMHQAEYALKSSVISSLTWTSSSSDIAAMRQLLVDQPNIPKDEVQAIFDIIFADEIC

SEQ ID NO: 54581 - protein, 573 aa, Oryza sativa; identical to SEQ ID NO: 34590

SEQ ID NO: 54582 - protein, 380 aa, Oryza sativa
MLASARGFWGRHRRKILVSLGVAGAGYAAYRYLDSHRRQLVRVEQRALEERAAEEIIKNQLQTHFENVQKISDTTTLPFAMHYLRSRIMEELDISHLTEKLMHGKGESSAPALTPKEKYDTWEKIKILSFTRTVSSIWAMTLLSLYVRVQVTILGRHLYLDFARVTDGAQLQEGSDTFSKSGHKYFLATADYLATYGINALITKMQHAATEILKEKQLKDPMGIDEVLETILQILKQFMGLCEDNSWINYLVPENANVYAQLMAVSSSGFDDSSLLKDVRKLDQLMSETRIVLSSDDFRNIMDRSLKKIASVVVEDLAVQIGAPIPPPGLPLAKLLAKVAQLSLPLLEEPDKNKHIQIIRSMPEVELFYTFLYANMPPET

SEQ ID NO: 54583 - protein, 704 aa, Oryza sativa
MRGAARLLLPLVVLLLHAARGSAGSTGGGGNGSCTQSCGRMRVPYPFGFSRGCTVQLGCDDASGTAWLGGTRGLGLLVSNVTPRAIVLTLPPNCSRPLNESLDALFTDNYAPTAQNALVVSSCDPQAAARLSNCSIPPEAYLEKSCNSIRCVLPSTKANVDGTNVTDPFLNRSEMRRLGSDCRGLVSASIYSNTAGPALQLTALELDWWVQGRCGCSSHAICDGFTPPSTQKEAFRCECQEGFEGDGYTAGAGCRRVPKCNPSKYLSGSCGKLVQIGLLVAGVFFGAMVMGITCLVYHLLRRRSAALRSQKSTKRLLSEASCTVPFYTYREIDRATNGFAEDQRLGTGAYGTVYAGRLSNNRLVAVKRIKQRDNAGLDRVMNEVKLVSSVSHRNLVRLLGCCIEHGQQILVYEFMPNGTLAQHLQRERGPAVPWTVRLRIAVETAKAIAYLHSEVHPPIYHRDIKSSNILLDHEYNSKVADFGLSRMGMTSVDSSHISTAPQGTPGYVDPQYHQNFHLSDKSDVYSFGVVLVEIITAMKAVDFSRVGSEVNLAQLAVDRIGKGSLDDIVDPYLDPHRDAWTLTSIHKVAELAFRCLAFHSEMRPSMAEVADELEQIQVSGWAPSTDDATFMSTTSSLCSSAPSRCTDKSWGTAKSKRQAAANAVVKQETTKCAVADSPVSVQERWFSDRSSPSSNSLLRNSSLN

SEQ ID NO: 54584 - protein, 329 aa, Oryza sativa
MQRYGLQLRTKPAASSSSRAPPPPPARPLAAFADDGDDDVEADILRQSYKKRSQQKVEEQQKKAMEEDPSVFAYDEVYDDMKQKAALPKMQDRVVRESKYIAALKEKAEQRKREQDIIYERKLQKERSKEDHLYGDKDKFVTSAYRKKLEEERKWLEEEKRRQLQEEKEDVTKKKDLSDFYFGLSKNVAFGAQTHDNTKHAKPEKLDEKVQDAKTSKVGAEVSDRSPKHKRDSGEGAETANESRSVEEPATTQSRDSAAARSTEKNADVSLDAPQTQTPENTQPAPQTQNPQNTQPAQVTDEHYKRNADALAAARERALARKKAKAQQI

SEQ ID NO: 54585 - protein, 190 aa, Oryza sativa
MIVDASRSGKVVVEKSTVPSGRPRPSRRSSRTTPMSSSSRCSPTRSSWRRSRPSLTCVLIGGRDTAAVQALKDMYAQWVPVDRIVTTNLWSAELSKLAVNAFLAQRVSSVNAISALCEATGADITEVATGAAQRAQVQLRRATASVGTARRRCGAPGERRQLKRLQDLACMCVHEVSEATWMVCARGIGQ

SEQ ID NO: 54586 - protein, 146 aa, Oryza sativa
MPRGGFSGSISSPRIDVAIDMGNPFLNRTVDGFLKIGAVGACKVAAEDTFDCLHRGDVSKHKLEHMLKKMCKEGAYWGTVAGVYVGMEYGVERIRGRHDWKNAMIGGALSGALISAASNNHKDKIIKDAITGGAVATAVEFINYLT

SEQ ID NO: 54587 - protein, 334 aa, Oryza sativa
MAAGSIVVDFPSMGAACCFSSLESLLRDSTSRFLAAGASRAELQKELRIWAVSSISVFQNQQFFGVLLNMLVNPPLPVYSLLSADDEILVRDVLYDALILVDYSFINKGAGVDQADSSLLPLYVSRLLITHDAINDARSKGDQGRAMSFMNAFFTSNIPTYFAKCATSQVGFNQLSKPAAITPQALLKWLVDLEDKGFKVFGENVSRIRERLMYDEVKNGYQSRMTHSDADLFFIDKQSGGEVMDTRAGEDEEAVEMETADNAFMAAAQSMKAMANGMRKRKDCGAEDANVVKFVKYKVEDSSVKDYFLSANNGMSSGSEVENPQSDDEMEETD

SEQ ID NO: 54588 - protein, 581 aa, Oryza sativa; identical to SEQ ID NO: 52326

SEQ ID NO: 54589 - protein, 51 aa, Oryza sativa
MSPVRQDGVSVVLGTSSRAQMEWIEYIAPPSIFRILLIQNCLRLLGCHLHH

SEQ ID NO: 54590 - protein, 246 aa, Oryza sativa
MAAAKKEKEEEEEASKLQLKPAGSKVFSKLLSRESAAAAPSFRVYYGVASAGSVPFLWESQPGTPKNAMSDAVLPPLTPPPSYYTAGKVSAGGGGGGGGRKYGKHGILRLFVLPKIRLRRGGRPVSGSPTSSCASSTSSSSSSASFYSSYSLSFRSTQSPTCSSMRSLQGHGGGGRAFGDDDDDDDDGGDDDMAASTACFRVRHESFRAIKNCRVAMTVRSAISSVAAGAGAGGHGSSAAVAQKAA

SEQ ID NO: 54591 - protein, 257 aa, Oryza sativa; identical to SEQ ID NO: 32943

SEQ ID NO: 54592 - protein, 624 aa, Oryza sativa
MKEKRGLEAAAAGGDSHPEAKRARPPALASVIVEALKVYSLQRLCSSLEPILRRVVSEEVERALGRLGPATITGRSSPKRIEGPDGRNLQLQFRTRLSLPLFTGGKVEGEQGAAIHVVLLDAGTGCVVSSGPESCAKLDIVVLEGDFNNEDEEGWSGEEFESHVVKEREGKRPLLTGDVQVTLKEGVGTVGELTFTDNSSWIRSRKFRLGLKISSGFCEGIRIREAKTEAFMVKDHRGELYKKHYPPALKDEVWRLEKIGKDGSFHKRLNKAGISTVEDFLRLVVRDPQKLRSILGSGMSNKMWDILVEHAKTCVLSGKYYIYYSDENRSIGAIFNNIYAFCGLISGEQFYSSESLDDSQKLFADALVKKAYDNWMYAIEYDGKALLNSKPKKKAAPTGHVETHPPLSQPASYEQRISSASMTGPSPAGGSGTGTDSIGYDGNQAATQPSQLQSTSANVPVPYDDTFSFLPPSMLMGSDNQETGNDGMGLELGQLQQAISQSQSIQPANVGYDDWTRSQNGQFADDFTEDIRMKSHQMLESEDMQQLLRVFSMGGASTSLQEDAFGFPTYMPSPLPNLGFEGERTRSSGKAVVGWLKIKAAMRWGIFVRKKAAERRAQLVELDD

SEQ ID NO: 54593 - protein, 390 aa, Oryza sativa
MADQTAAAVVVGGGAAATMGEPSPPPPAPAAEAAGVGVGQQQRTVPTPFLTKTYQLVDDPAVDDVISWNDDGSTFVVWRPAEFARDLLPKYFKHNNFSSFVRQLNTYGFRKIVPDRWEFANDCFRRGERRLLCEIHRRKVTPPAPAATTAAVAAAIPMALPVTTTRDGSPVLSGEEQVISSSSSPEPPLVLPQAPSGSGSGGVASGDVGDENERLRRENAQLARELSQMRKLCNNILLLMSKYASTQQLDAANASSAAGNNNNNNCSGESAEAATPLPLPAVLDLMPSCPGAASAAAPVSDNEEGMMSAKLFGVSIGRKRMRHDGGGDDDHAATVKAEPMDGRPHGKDEQSAETQAWPIYRPRPVYQPIRACNGYEYDRAGSDQDGSNST

SEQ ID NO: 54594 - protein, 760 aa, Oryza sativa
MAAFTKLEDSPMFRKQVNSMEQLSDELKQRCSNLHKGCKRFMGSLDEGYAGDLTFADALEAFGAGQDDPVSVAIGGPVMSKFTTAFRELGTYKELLRSQVDHMLSERLMQFIDVDLHGVKDCRQRLDRATVGYDQAREKFVSVRKGTRAEVVTGLEEDLHNAKSAFERCRFNLVHALSNIEAKKKYEFLESISAVMDAHLRYFKQGYELLSQMEPFIHQVLTYAQQSKEMAINEQDKLAKRIQEYRTQEEIANLRMASNVDTSTSGDGIHVVGLQSYKKIEALMQSTANGEVQIIKQGYLFKRSENSREWKRRFFVLDSHGTLFYYGNKGQSQGAASQQTAGEGTGVFSRFRFLNQKAPTQGDNALSCHKIDLRTSTIKIDAEENDLRFCFRVISPMKAYTLQAESGADQKDWIEKVTGVIASLLNLPFPRQVSYGNLEAEHHGSANSVDSLSLEENKSPEGHDDIFNHLRNIPGNDSCAECRSPDPDWASLNLGILICIECPGAHRNLGVHISKVRSLRLDVKVWEPVIMDLFHELGNDYTNSIWEAMLPKEDQGINEFNDAILFIEKPKPTDAFSIKERYIQTKYVDKLLIAKDTNQITIDILEAVRTNDVRAAYRILVLADVSPNMIYDELNNDVHHDPSVTDGKLFDPASCDVKDDSGKPEGCLQGCSLLHIACQYGHSIMAELLLLFGADINKQDFHGRTPLHHCVRRKNDALTKHLLKRGARTTIKDGGGLTALERRMELGAITDEDLFILFVR

SEQ ID NO: 54595 - protein, 81 aa, Oryza sativa
MHRTVILVKHAPLFVRSHLGLCRTYFIVYTLSESSVYTQEPSRQIMCLMHQITFLLHGFYLLRVKQLGEPLEFLPLYPASK

SEQ ID NO: 54596 - protein, 472 aa, Oryza sativa
MADEEHAPTSRKRVAGTQINKDNPEPDDDSTEQEMGTFKRASEEVMATRRIVKVRRQQPSSAPSNPFSAIRFTPSDTSAQATIPVSEPQPSDVITANAKDSSSEKADEGSNGSGKDALPVTDKSAGSSEVAETEKDGSDLKGSDEKAKSSDSIEPPSQPVETTDETKDLGGGSVVAGEAKEDNSKASDIEDKTAKEGDAEEEDGANEAGAEDKISKGDDEKKDGDESETKDGSSEEQKDADNKGQSSSPTPLFSFKNLSSGQNAFTGLAGTGFSGSSFSFGSGSKESSSAPLFGLKTDGSSFPSFSIGASNNGSSSPALATSAEAPKKFAMPEGPVETGEENEKAIFTADSALYEYLDGGWKERGKGELKLNIPVSGGERSRLVMRTKGNYRLVLNASLYEDMSLKDMDKKGVTFACMNSIGDSQSGLATFALKFRDTSIREEFKAAVEMHKAKKASGTLKTPENSPKASDD

SEQ ID NO: 54597 - protein, 347 aa, Oryza sativa
MSSQVDNRSQSAGKRARTDGGRREDDWVCPSCQNVNFAFRTTCNMRNCNQSRPTDYTKDMQKPMQTPPPHFPMSGGYMSPGTPPSMYLGGGAPPYGTSLYGGPALPRYGIAQFPGGSGYPYGYGGRLPMGSPYGPPMHMAGPPYSAGSMMGPGGMYGMPMDRYSLGLPAGPGPMGARAGSYSEEGSQKKPAGAGRDNDWKCPNCNNINFAFRTVCNMRKCNTPRPENQGSKPDGARGPKPKMPEGSWKCEKCNNINYPFRTKCNRPSCEAEKPFQTNNANESSADQDNQLLSCNIVKLLSKLQLSHDFRDNNEQTKVDPPGGPAGVPTSSHALRMAALSELQNSVKS

SEQ ID NO: 54598 - protein, 468 aa, Oryza sativa
MTMEAERDGEEQRRPLLSSSSPPPPSPAAEHQHQHQQQYQYLGRSSSSALRGGGGGGGGGAGWGVGPEVSAAEVRSAASISSASYYPPPPALHHDVYPPDIHSPSPSPAAPTAPHPHGGLAIVPQGPYPYGGEYQPSHDGRRDVLDEVEIRQLLIDHVGHRCCWGSRPARTWKITSIEDCNVYVGTLETFIEERDTVTNKEPYDGGKIDGRDKGPVLAVWELDLRSEFPLLFVPEKEVMVKIPHSEVIEKCLDCESRGEIPCPICNAGQEHGFYKANQMTRCSACHGRGLLAHQDGSDTVCGMCSGKGMLPCIACGSRGLVTCKTCSGYGSLLAKSTAHVRWKTLSARKVSATRGAASVPDEVFHRAQGIQLCNIQAYQCTPAFFADSYQLNQFSSEVVASRLPVPPSARVISERHIISVVPVIRVTMAHRKQCFSFYVVGYNRDVFIRDYPSKFCWGLCCCFEWLRN

SEQ ID NO: 54599 - protein, 662 aa, Oryza sativa
MAAAAAQAQAQQAASSASEGGSPASSAAAAAAAAASFPATSLYVGDLDVSVQDAQLFDVFAQVGGVVSVRVCRDVNTRRSLGYAYVNYSSPADAARALEMLNFTPINGKPIRIMYSNRDPSLRKSGTANIFIKNLDKSIDNKVLYDTFCVFGNILSCKVATDASGESKGYGFVQYERDEAAQAAIDKLNGMLMNDKKVYVGPFIRKQERDNSPGQVKFNNVYVKNLSENTTEDDLKEIFGKFGTITSAVVMREGDGRSKCFGFVNFESPDDAAQAVQELNGKKFDDKEWYVGRAQKKSEREMELKEKFEKNLQEAADKYQNTNLYLKNLDDSVDDDKLRELFAEYGTITSCKVMRDSNGVSRGSGFVAFKSAEDASRALAEMNSKMVGSKPLYVALAQRKEDRKARLQAQFSQLRPVPLAPSVGPRMPMFPPGVPGVGQQLFYGQPPPAFINTQPGFGFQQPLMPGMRPGAGPMPNFIMPMVQQGQQPQRPAGRRAGAGGMQQPMPMGQQQMMARGGRGYRYPTGRGMPDPAMHGVGGGVMPSPYEMGGMPMRDAAASQPVPIGALATALANAAPDQQRMMLGENLYPLVDQLEHEQAAKVTGMLLEMDQTEVLHLLESPEALKAKVAEAMEVLRTAQQIQTNATPEQQLASLSLNDGVVSS

SEQ ID NO: 54600 - protein, 918 aa, Oryza sativa
MEAAIVSASTGVMRSLLAKLANLLGGEYKLLKWLRREMEFLESELRSMSIFLERLEDTQKLHPQMKDWRDRVRELAYDIEDCIDDFILQLDSKDAKVGFGQKLLASRRIGHMIRELKARVMEESERQRRYMLDGLASGPSVRVKVDPRLSALYVDEDRLVGIDAPRDEIIGRLLDKRRSASAKQVMTISIVGCGGLGKTTLANQIYCKIKGKFECAAFASVFQNPNTKKVLTNILSQVATTAAVEDDEQAIINKLREYLSDKRYIVIVDDIWDMQIWKFIECALVKNCRGSRIITTTRIHDIAKLCCSSHGDYIYEMKPLGVIDSKILFDKRIFDPEERRPPQLTEVSEEILKKCGGLPLAIISISSLLASKPKSKDQWDRVKVSLSSTLERTPDIETMEWVLSLSYSDLPNHLKTCLLYLSIFPEGYEINRERLVSRWIAEGFIYKKHGQNPYEVGDSYFNELVNRSLIQPANIKPDGQTNACRVDDTVHDFIVSMSVEENFVTLFGGSKLVPRSHGKVRRLSIQNGGIQENIVTSTHLVTSQVRSLTLFAVEMPSLLGFGMLRVLDLEDCYALEDHHLTNLERLVQLRYLSIRTSPISELPKQIGQLQYLETLDLRATGVEELPSTIGRLKSLVRLFVDYHVKLPKEISNMHALEELTSFSALMYSPDFLKELGQLTNMRVLRVICDCDSFKGDAGSCLENLASSLCNLGTYNLHSLFVDINGYGEDNFSLDTWQPVPSRLRRFSIDRWCPINKIPNWVGSLINLEELVLYVNKIWQEDFELLGHMPALSSLTIYSNTALQGRIIISGFHSTKFFKFYCNPAGLTFDAGSLLKLECLDVIMNVFNTKSSNGSFDFGIQYLTNLRNVYIQLDCNGSTGGELEAAKASIKSSVNKLPGQPKLNLSTLNENMLVHEEAN

SEQ ID NO: 54601 - protein, 299 aa, Oryza sativa
MPNCLDAILLRSAERRPIFSFPRPFCGGFPITASCDGLLIVGGYICNPTTRQRAPISRWTIDNIVGLYRHEPSGEYRVLYFASSDTPSEVYCPICYCVLAVGSNKPRQIPCSVTPMDEEIIGAPGPMIFGRPVLIHGNLHLHWKKRRGTRYNRILVFNTVAESFRQLRPPAVNPRNYTRLLAMDGMLAMSVSKERVMDMSIFMLEDYDHEVWVFRYKIKLPTMEIRRFQDQGDWWAEVVSEEGDILVSCFGWLLHCDKRVIWCPNSSTMMTCQQSVLIESRKALFSTPFSRKEQRNDPD

SEQ ID NO: 54602 - protein, 359 aa, Oryza sativa
MERAVRELWAESRDLLGLHSPDDAAAADAAMPRAEMPPTPLAFLRDHVSPGRPLLVSSAATSHWPAASLWPTDSYLTDALRSTAVSLHLTPDGRADALAPHPRPSHPGAKCFASAHVRQVDFPTAVRLIRSSDPASGLVAYAQQQDDCLRGEYAAVAGDVDAHVPWASDALGCLPEAVNLWIGSACSQTSFHKDHYDNIYVVVSGEKHFLLLPPTEHHRLYVRDYPAAHYAAEDEAELRLKLELEEPERIVPWSSVDPYPPSPEEAAAQASSFPLYFEGPRPIRCTVRAGEMLYLPSMWFHHVSQSPGPNGLTIAVNYWYDMQFDIKYAYFNFLRSLEIDGSSSKKTDALEDDLEETND

SEQ ID NO: 54603 - protein, 510 aa, Oryza sativa
MEERLADVEGSFACNSRGEDDFRSCCGDEDEWEDTEESFTAGVAKGELDESSVRLFFKGVSSPEAEGKKLSGIGVVMERSPGVPMLQVQKKLDFYVDELVADHLALMDGLLVALQNGIRKIFAFTNSEKLYFQIAEAEILEDQLLVALGHRILELVEKLEDFDIILLPSFELERPLQLAKEAIGIMYLSPYEVGTCSICCEEKRGAQMIKVGCAHTFCYSCLTSYTQEKLQTNKVPIRCPQLRCKYHISASECKSFLPVSCYDSLERAFAEAGTSDMERFYCPFPNCSVLLDLSQHFSRASTSSQSDLNCVECPECHRDICINCGVPWHVMMGCDEYQSLPVDERDAGDLSLHRLAQNNRWRRCQRCRRMIELTQGCFHMNCWCGHEFCYSCGAEYTNGIQTCQCVFWDEESIEAASAAHSTQASEIWAWDTFDCMPTAIEGYSEQERAQLALIQRFLSGGFNLGEPPSQSPPRCADSYIIDTMKDLHQLPWLERFVSVISDSYNEDYIQ

SEQ ID NO: 54604 - protein, 68 aa, Oryza sativa
MVPKLIIHQPKSAWWGQPSLVSKCHTQDSKKEQPLASLVLKFPVLLPAFLSYVFIFERDKQNMNNHID

SEQ ID NO: 54605 - protein, 813 aa, Oryza sativa
MACSFLCKPWLPLTESAKPARSPAPSSRARTVVQQLAVLLLLLGGVGGGGGALLAAAASTTDTILPGESITGNQTLVSKNGEFELGFFNPGVGIHYFLGVRLRKLAAYSPTFWIGDRVYVVDLPRAALELFGDSLYIKEDGASLWWSSPSSSSSSSGGGRGGGAAVAVLLDTGDLVVRDQRNSSLVLWRSFDYPGDALLPGGRLGLDVATGENVSLTFEGFTHNGSLRADASRRNGFVLTTDGRDTRGAFPDWMVTTQDNGGSLVLNHPDATNSTEFLQLKVGQVSLVRWSGADAGWVPRWTFPSGCKSGGGFFCGDFGVCTTATGGECRCVDGFAPSDTKEWGLGYFVTGCSRSLPLSCDANGQTEHGDSFAILDNLQGLPYNAQDEPATTDEDCREACLNKCYCVAYSTETGCKLWYYDLYNLSSADKPPYSKIYVRLGSKLKSKRGLATRWMVLLVVGSVAVASAMLAVLLLCRYRRDLFGSSKFVVEGSLVVYSYAQIKKATENFSDKLGEGGFGSVFRGTLPGSTTVVAVKNLKGLGYAEKQFRAEVQTVGMIRHTNLVRLLGFCVKGNRKLLVYEYMPNGSLDAHIFSQKSSPLSWQVRYQIAIGIARGLAYLHEECEHCIIHCDIKPENILLDEEFRPKIADFGMAKLLGREFNAALTTIRGTRGYLAPEWLYGQPITKKADVYSFGIVLFEMISGIRSTVTMKFGSHRYYPSYAAAQMHEGDVLCLLDSRLEGNANVEELDITCRVACWCIQDREGDRPSMGHVVRMLEGVVDTEMPPIPASFQNLVDGDDSDIYEENWRLRTQD

SEQ ID NO: 54606 - protein, 327 aa, Oryza sativa; identical to SEQ ID NO: 31344

SEQ ID NO: 54607 - protein, 696 aa, Oryza sativa
MCRGSVLLLRVHAALLLLAALPALIAGQPWEICGENGNYTANSTYQANLKQLAAALHKNVSSGTGGGRLFASGAVGAVPDAVYALALCRGDINASACADCVGTIFQDAQQLCPYRKEVSIVYDSCYLRFSNLDFLSSADNSGVVDLYNTGTVSGDVGRYDRAVTGLLNATARYAAGNTNASSRLFATGVMVGFDAQFPKIYAMAQCSPDLSPAQCGLCLGAMVARWWQTFEPNTQGARSVGARCNMRVELYSFYNVPSMLQLQAEAVAPSPSPAPAPAGKPPAVPGTTGGKRRNGAGKVLAIVMPIVAAILAVTVIGFCFWRRRRPEKTPPPGPLRSASRSEDFESIESLFLDLSTLRIATDNFSENNKLGEGGFGVVYKGSLPHGEEIAVKRLSQSSVQGMGELKNELVLVAKLQHKNLVRLVGVCLEEHERMLVYEYMPNRSLDTILFDAEKSSLLDWGRRLKIINGVARGMQYLHEDSQLKIVHRDLKASNVLLDSDYNPKISDFGLARLFGGDQTQDVTNRVVGTYGYMAPEYAMRGHYSVKSDVFSFGVLVLEIVTGRRNSGSYYSEQSGDLLSIIWEHWTMGTIMEMVDRSMGERAAGGEIARCIHVGLLCVQENPASRPAMSAVNVMLSSGTVSLKAPSRPAFYIRKGGGDDGGGTGSYSGSFVGTLPSSGRSAPMSPNEVSITELEPR

SEQ ID NO: 54608 - protein, 60 aa, Oryza sativa
MDADSIYHCTSCYGCCMRSMPDHVPGRHVILLKVSFFYTCSIVPCTNDFPAAVGWPPGLS

SEQ ID NO: 54609 - protein, 65 aa, Oryza sativa
MFMSTSLGSQRKTKCHMFGCPFSSWSSGPPWVFFNKGFPGIFCQTSLTHGHGLYFSVLPPPAYLA

SEQ ID NO: 54610 - protein, 1000 aa, Oryza sativa
MDAAAAAFAPGGQLFSVDPLERHAARGHGVVTSMAAGSDVIVLGTSRGWLVRHDFSFEDAHDLDLGTGRSGEHSVHRVFLDPGGKHCVATVVHPGGAETYYHHARWPRPKLLPRLRNVLVNAVAWNRQTITEASTKEVILGTEDGQIFEIAVDEADKKEKYVKSLFTLSELQEGIKGLQMETAVVGNATRFYVMAVTPTRLYSFTGIGSLETVFASYSDRAIHFMELPGDIPNSELHFFIKQRRAKHFGWLSGAGIYHGELNFGAQHSSTSGDENFVENKGFFDYSKLGESGIKPRSFALSEFHFLLLIRDKIKVVNRISQQIVEELIVDSSPEVTKGIIGLCSDASTGLFYAYDENSIFQISSSDEGRDMWQVYLDMKEYATALSHCRNSFQRDQVYLVQADTAFNTKEYYIAASFYAKMNYILSFEEISLKFISVGEQDALRTFLLRRLDNLTKDDRMQITMISTWATELYLDKINRLLLEDGTGATSNAVADSKDSEYRSIVNEFRAFLSDSKDVLDEATTMRLLESYGRVDELVYFAGLKEQHEIVVHHYIQQGEARKALEVLQRHNVLVDLVYKFAPDLIMLDAYETVESWMMARNKLNPGKLIPAMMRYVSEPHAKNETHEVIKYLEFCVKDLNNEDPGVHNLLLSLYAKKDDESQLLQFLDTKFGKGQTNGPEFFYDPKYALRLCLQEKRMRACVRIYSMMSMHEEAVALALTVDLELAKAEADKVEDDEELRKKLWLKVAKHVIEQEKGVKRENIKKAIEFLSETNNLLKIEDILPFFPDFVLIDDFKEEICKSLKDYDSQIDQLKQEMDDATRGADNIRSDIGALAQRYTVIDREEECGVCKRKILTAGGLHQVGRSYTSTGHMAPFYVFPCGHAFHANCLIAHVTRCNSSQTQAEKILDLQKRLSLMDRKAAKENGGNMNGESIISATPIDKLRSQLDDAVASECPFCGDLMIKEISLPFILPEESDEKASWEIKPQPTGQKILPMTMSI

SEQ ID NO: 54611 - protein, 435 aa, Oryza sativa
MEDAAVEEAEVSGGAAEFAPALVAAHPLGRSVAVAVGPELRVFDLKASSAVSLSDNSGGGSHSDAIRAISFSANGALFASAGDDKLVKVWKTDSWCCIRTITSEKRVSAVAISNDGTYVTFADKFGVIWLVTMGESGGEQEPTDNKPVSIFGHYCSIITSMKFSPDGRFIATADRDFKIRITSLPKKPLRGAHEIQSFCLGHTDFVSCIAFTCLSEGPSFLLSGGGDSTVRLWDYINGCLLDTCQVRDKVGELLEPNETEDNNLSVADICPTNDGLLVAVAIQSLSGVMLLACDLIAKKLSFLKVVTTEKCYIPTSLSSSFSADLLWTVMGASNMPNQATSQLCTRLKIIPHFKKDPLAGCDHVPTVLGDSEVPHGEKLLLALQGSLDIAKQEEVLASVLAALKVSMHKMLVKKHYSEERREQRKRGRNDKKIKK

SEQ ID NO: 54612 - protein, 836 aa, Oryza sativa
MPTVVDGVSNSVQPEVSNTIYAKDDVDVHNKMVDAQKDTGNLATSGLDKVDKEACSNLKKNNKCSPDSNIADKLDSVTVASGLLMKDVPSSVSLMNPDNDVNKTGENIPMMEKKECEDSTVAKKEHEDTILRRARLIEVNIKKAGERSLCNISLEKKPKSHWEFVLEEMAWMANEFMQERLWKSAAASQMCHWIALSGRATFEEANIQRKQKSIARILAKSIMKFWCSAETLRATSGEMRKEKQAEESIGIGETKLAGINAEKEQCNEPLEQEKLQSPIQSYALKFLKDNCNISECLSLAEAPATPDRLNDFGILKVPDQLSEANLFYGVAPGAMQAYREFVEGPFVANKKTNNSRQKNDYEPSTTGSVADAHRGHAYEDDDVEASTYVLHGTYDDGLPSKSSHKKKHLMQQRMNGTRHYSTGVDMPYDPYVESKPGNQPFLSNGKRPSDFFNIPTKRIRTAARQRVVSPYPANASGATAFTSKTDASSGDTNSCQDDQSSLHGGSFPRKNVDIESTVDFDRQLYDGSEVSTKSKKKKKSKHPGYKTPQSVAESCSLIAGKKDYLKKRSEVHQFDSNGNIVINGQHAAKKPKLMNQAPDVSLEALTPVGPMVSPAASQMSNMANPTKIIKIITNRDRGRKNKVLKMAASHSGPGSPWSSFEDQALVVLVHDMGQNWELVSDALNSIVQLKCIYRRPNECKDRHKLLTEKGSGDGADSADDSGSSQHYQSTLPGIPKGSARHLFQRLQGPFEEETLKAHFEKIIFLGQKLHPNRRKGESQELKQINPLHSSHLHALSQACAPGVILMYEHCCVQFICSFPVSTVPASLLYTLSNARI

SEQ ID NO: 54613 - protein, 670 aa, Oryza sativa
MSGSDHLLDALLAAARAALSHLHLPFPGSNPKPHYSDDLHLLGVGVAHFIHRSPPFTTRACFRRTKHPPPPPPGPPPHQLLLCIGIAFHNLLDNHLLHHFHTLLIHANKPHFDAFLSNLPFAKLKVAPPPQPSASVSPAPPTPAQTGDKEDTDTAANHSPRSTLPVRLLNIPVDRLRSTLSTLSLTDLIDLVARSLPSPDTHPDKKKLFSVHDFFRYAEFEGKRFFEELDRDGDGQVTLEDLEVAMRKRRLPRRYARDFLRRTRSNLFSKSIGWKQFLSLMEQKEPTILRAYTTLCLSKSGTLHKNQILTSLKGAGLPANEDNAAAMLRYLNADSEESISYSHFRNFMLLLPSERLEDDPRNIWFEAATLVAVPPPVEISAGSVLKSALAGGLASALSTSVMHPIDSMKTRVQASSLSFPDLISTLPQIGLRGLYRGSIPAILGQFSSHGLRTGIFEASKLVLKSVAPTLPDIQVQSLSSFCSTILGTAVRIPCEVLKQRLQAGIFNNVGEAIVGTMQKDGPKGFFRGTGATLCREVPFYVAGMCLYAEAKKAAQHVLNRDLEPWETIAVGALSGGLAAVVTTPFDVMKTRMMTAPPGTPVSMQLIVFSILRNEGPLGLFKGAIPRFFWIAPLGAMNFAGYELAKKAMIQTESDSTDSVHEKRTTVGSRG

SEQ ID NO: 54614 - protein, 232 aa, Oryza sativa
MTVVDAESRFHVLAVDDSLIDRKLIEMLLKNSSYQVTTVDSGSKALELLGLRDEGDDSSSSPSSSSPDHQEIDVNLIITDYCMPGMTGYDLLKRVKGSSSLKDIPVVIMSSENVPARINRCLEDGAEEFFLKPVKLADMKKLKSHLLKRKQQLPMAAAAPDKPPHKPDEAAASAAAIAEAATAQTDGIISDCSCSGSSKRKAAAMEQEVISSPDQRTKPRLSSTSSGLAVET

SEQ ID NO: 54615 - protein, 792 aa, Oryza sativa
MSSALEVEGSGSPGVEPAATATASRLKRHDSLFGDAEKVSGGKHHGGSAVSWAVTLHLAFQSVGIIYGDIGTSPLYVYSSTFPDGIGHRDDLVGVLSLILYTLIIIPMLKYVFIVLYANDNGDGGTFALYSLISRYAKIRMIPNQQAEDAMVSNYSIEAPSSQLRRAQWVKHKLESSRAAKMALFFLTILGTSMVMGDGTLTPAISVLSAVSGIREKAPNLTQTQVVLISVAILFMLFSVQRFGTDKVGYTFAPIISVWFLLIAGIGLYNLVVHEITILKAFNPWYIVQYFRRNGKKGWVSLGGVVLCVTGTEGMFADLGHFNIRAVQISFNCILFPSVALCYIGQAAYLRKFPENVSDTFYKSIPGPLFWPTFIVAILAAIIASQAMLSGAFAILSKALSLGCLPRVRVIHTSKKYEGQVYIPEVNFMMGLASIIVTIAFRTTTSIGNAYGICVVTTFMVTTHLMTVVMLLIWKKHLVFILLFYCVFGFTEVVYLSSILSKFVDGGYLPFCFAMVLMTMMATWHYVHVRRYWYELDHIVPTAELASLLEENGGVRRVPGVGLLYTELVQGIPPLFPRLVRKIPSVHAVFVFISIKHLPIPHVAAAERFLFRQVGPRARRVFRCVARYGYTDALEEPREFAAFLVDGLKMFIQEESAFAPHQEMIDAAADDDDEAAARPRRSTSSAVHSEEAIQAASSGRTTASSVQLQAGGEPPAAMDVEEEKRLIDREVGRGVVYLMGEANVSAGPNSSILKRIAVNYIYAFLRKNLTEGHRALAIPNDQLLKVGITYEI

SEQ ID NO: 54616 - protein, 418 aa, Oryza sativa
MSDHHHLTGDHHPSPASAATTALGPLLLLPSELLHDILIRLALPELLRVRSVARPLSHVISSPDFRRLYHLSSAASGPGPAAAWLLVFKKLRPRDAALRGFHGPSGRWFRIPVSAILAPAVPPGEDLYFLGASGSSFLFAANGRRELVVVDLSAHAARRLPPSPLGPRGTSSWRRFGLKLVADPPGSSQFRFLFAELVNNTPLLFEYQSETDTWQSSEAVQAEGASTAAGTEGTFLCAAHAGPDCVMVYSGPGVERPVFFRPRFPHNPNGGGDRLHVYGDGSAAVVRSTVIDEPGRPRVKVVAGVDLYGFGSVVGGDWQLASTVPGELVEGFRKPYAVMTGLLSEREGVVRLVLISNCRGAWDIVWLSYDRARGEWWWVPVPDWGTKGLNVAGIAVSSTFSRLWPPAAASSCTTTTSQ

SEQ ID NO: 54617 - protein, 264 aa, Oryza sativa
MCHMSACALLSYAAIAWLRVVPMQLVRSRVQLAKIAALSLVFCGSVVSGNVSLRYLPVSFNQAVGATTPFFTAVFAYIMTVKRESWVTYLTLVPVVTGVMIASGGEPSFHLFGFIMCIGATAARALKTVLQGILLSSEGEKLNSMNLLLYMAPIAVILLLPATIFMEDNVVGITIELAKKDTTIVWLLLFNSCLAYFVNLTNFLVTKHTSALTLQVLGNAKGAVAVVVSILIFRNPVSVTGMLGYTLTVIGVILYSESKKRNKP

SEQ ID NO: 54618 - protein, 89 aa, Oryza sativa
MVCSVLVEVKEGAVPCLWEEKKRCILATMCLQYNPISSLSYYLWLLYPVLSIYLLYCNGIKFLALLYMIIFDHIQLLVIHVVRAEWEFC

SEQ ID NO: 54619 - protein, 385 aa, Oryza sativa
MSTPSQKKRRSKGKDGAVAPVGLRLNRLGRASPREAAGKPVYLAVEHDDDQEVPAHSIVELGGGGGGGEAHLVLHNVRGMSFATVESRYGPRIVGVGGKLFTTVYDPKTSMEIPGPFLVEPKLRPVLIPRGSKLYALSRTPSVVPGLDFLPWFVYLDLNYVLVAPHDARTMGWHHLPPPPIFPVRLNPLKYRDPPEVRVASYAVVGSHILLSVQQDKGTCAFDMDTNQWDMVDANNLPFIGKAVPLGGHLFIARSIANGGAAAVYDIRVFPLQPTSSGSHKTELSILNIPVVSKGIVPGQLFCSLGKGIFSSIDVRSAATPGPDAKLHKARIVHRTYSQVGGDDTEDNNYTVITKQHRQIYKLIDRTRHLAHPSPVVAALTMEAE

SEQ ID NO: 54620 - protein, 215 aa, Oryza sativa
MLPDQVQQGPVVLGQHRDGDHHRHELLPRGQVPLRPERHGVRRHGQAGAQRQAPPLGHHRHPVQARPLQLPGPQDQLPRRGGLQPGVLRRARRVRGPRRRRRAGRPHGVQVGVRRRHRRLDADEGVVGLHLAPRLQPPPPGALLPPHPQRLRQDARRQQRHPGELVPQLQLPLHRPVQLDQSSTADRIWNHIGSRSIDRSISLFSTTAAAKFAWD

SEQ ID NO: 54621 - protein, 801 aa, Oryza sativa
MGSRREEERNEKIIRGLMKLPPNRKCINCNSVGPQYVCTNFWTFICLSCSGIHREFTHRVKSVSMAKFTTQEVRSLEQGGNQRARDIYLKDWDWQRMRLPDNSNPDRIREFIRAVYVDKKYAGGKSTDKPVNDSESVKSSENLTRRPSSYHSYSQSPPYDFQYEDRRYGKQVDTLARRPSDRAFFDGKLGSFLYSPGRLRDQMHEDRFANESTGSRFSDFSASSTGDIRNDVLSPSSQDTGYSSPSIHHSRNVSSENPPSHRHPNATSQIDFNGVRRSQRTGSSGSFGSFDGSSASNKSVDSGALPDAPTEKPVNSAVNRQSVAPPMAHSAQLYASQSNINSSVSQTAPTRESVQHGRVHMVSVAKPPVSTQPTTSTNQDFFDQSMQHPVNSAAPIDLFAGFNQQAPSVPHRAVDVGSHSVPKETLHDVVVQKAVASSPPVQAEAPSTSHPVHHDLLSLSPLQEPSISSTPPSIDLFAGFDQQLPPTTSVQQSQPAEPSISSTPQSIDLFAGFDQQLPPTTSVQQSQQAAPLVADEGWAFFLDTPQHVPPTSISNVQAQVATAIAAFPPSESLAKGTNQSMLPTSPPNALIPQSYPLMMDQWSLNAEEVKTPVSKETSQPWNAFGASTGNTPNDSFTFNTISQVAPNHFNVPSVPHAEARGPQDLPSSEPERLTPGDITPGFNVSPGDMAGPSFRGPLQQQLDIVPSQPAKSTNPFDMAFESDVEASNMFMDLTSLQETLPNPHVNTDYSNLTESWIPHNSNMPYISSGPQGGLSYMATQVQDSLMLNSAQGSFPPRNPFE

SEQ ID NO: 54622 - protein, 396 aa, Oryza sativa; identical to SEQ ID NO: 29111

SEQ ID NO: 54623 - protein, 528 aa, Oryza sativa
MNNSAFSEEILAEKLAKLNNTQQCIETLSHWCIYHRKNAEQIVQTWAKQFHSSGNEQKTPFLYLANDILQNSKRNGTEFVEEFWKVLPGALKDVTENGDERGKKVVSRLVEIWQERRVFGSRAGGIKDVMLGTVPLPVLDMTKKRSHGSSIKIVKRDSRSVKLRLGVGGTAEKIVSALHTVLSEQADEDSDLEKCKTSMRRVGKMQKDVSSACSKGDDPRRETLCTELKEEEDSMTECIEKLKVVEANRATVVSELKEALQEQESELEKVRTQLQLAEAMVEEAADMQRKLKNEPVIPSSKHLSSVEPGKPLSNGQAKDQQKTAAAILADKIAASSNSQQILQSALSKFAAEEAKNSSETHQDKRLKIEHSSQVPSVANAAAFVPMPQMTTTTAQQPQAILVQQTPMQNQPPAPQPQYNIYQAPPHQFVQQPGGVMMGMAYNMSTMAPPPPPPPQMMNLARPSPSTPQPPMGIMPQTQPPPPAPTMLQQQMPMNVGPPMQFALQQSGAPSFRPLQPPPGMQFFHPQSQ

SEQ ID NO: 54624 - protein, 411 aa, Oryza sativa
MASPPSPSASRAVAVERSPGFGLEPSSSSSSSSSAPSRNELLTMVKKHSHLIGWTVVDAEDDASDVGMDDRFWHEMLDLFFVRGRVSKRREEDDLVFFVNNNMKMHGHGFNDNMEDPPPFFVRRWAPMLEKISNINSAGVDWERSFYLNLIAHTSYTVTVAICSVRDLRSRVEKSKPLSPVYKVTKTVYASPSRVNFHLDRRKAVETVPAYPNICFSVDDFDDTFDAVVLSDPEHCYCVILNAHDGAAFPEDTESKNASSNLLNTGSNQEKPPKRTLFSGYVSYQNVREAYNAGRSQFGSLLSLGHDQTKLDKLYMRGPEGRGEVEVAVSGIADQSHERSKKDPGDSFRVFVHRAASAASKLAKHAYEAASTNKRFDHELLPLKCCLMSVSLPWDYIAHDLLHKETPPLDL

SEQ ID NO: 54625 - protein, 315 aa, Oryza sativa
MAANGSGTTDSSQSVKSNGVPDCSTKGNSNASPVPVVPSSLLGIGGFVPSAQIAGMHSYMMHPQGVPPSLASPNSAVPQFGSFQSQSTIQPNMQWPNQQEAQNASQTPDETNYHTSPPDQKALQQAAGNNDELSLKQNQATRAEHLTATAHGKQQQQQRFPSVVSESTHEQKLQVVESNVTEHLVYNEQQKAQDSSSIVSPIRKFEHQEQTNEFKDEKVASGNQSEEQVARHQHKASDFDASTTQIHLKGGAAEFTANVGNQTDTHTSAGGGLGSLLPRIPKEPSLLDERSLLACIVRAVPAGPDGRIKISTTLP

SEQ ID NO: 54626 - protein, 708 aa, Oryza sativa
MATVTPGVLLKLLQAMHTDDRVAGDHRSHVLQVTAVVPALTASTADSLWPSNGFLLQLSDGLHSTYVQPSSADADALVSARPQLVGHLVHLDRLRFARPVPRAVGIRPVPSSRSVSFVGNPEPLVARPAACSRGYVIQPGSHSDSAPPLMPSSSGNAVQSDATDAVKRIVLAPKSVSEAAPPPAVSAAKRRFSSPAPSKQRDPSPSVKGGASRPSSPSVKGASRASSPAVRGTPRATSPAPSKCVVPSLVSAKEENRRTAREPAIIVPSRYRQPSPVGGRRGAASPAPGGRRASLSPSSRRLSGEGSSKKKVGVLVAGISKMTDLTNGSAVKPGRKSWDNTSIAAAAGSVMKSKVKVDKSTILRTQEAMARRLSDVTTELSSNDDDSSVDEKPKPRKKIESPAVKTKAMAPKIMLHDPKWTDGSIPLDGVSDVLSKMGKEATERRDAAAIAAADALQEALITESVIRNLSKFSELTSASKTSNPLPTVDIFLAVYEDTLKWKKIAESISTNRTETASWENSATHWVEAALATDLEVLKLMNKAPESLSRKRGADKPKAPSVVEAPRTTISKRQSHGTSAKVQSKVLPTSTASCAWNKTQGVNETAELATTLCREMHTWFLKFVDEAMDLGFHLFEDQNVASRGKQSSHITMVLSQFKKISDWLDGVGKIAEEATTKDKVEQLKCKIYGFVINHMGSAFDSSVSISSRN

SEQ ID NO: 54627 - protein, 297 aa, Oryza sativa
MMEKRVPEARAVLLQISESEAEVEERIAEIEEAANLLKSTKSEDKAVWMELLNPSPAVRRMLYAGCGIQMFQQITGIDATVYYSPTIFRDAGIKSDQELLAATVAVGFTKTVFILVAIFLIDKVGRKPLLYVSTIGMTMCLFVLGIALTLQKHAMGLISPRIGIDLAVFAVCGNVAFFSIGMGPICWVLSSEIFPLRLRAQASALGQVGGRVSSGLVSMSFLSMARIISVAGMFFVFAVISTVSVAFVYFCVPETKGKTLEQIEMMFEGGKEWRGSEIELEDTQHLIQSSKKSVSLG

SEQ ID NO: 54628 - protein, 638 aa, Oryza sativa
MRSSWADSAANAEESAPAAAANHGNSRLPRSSYVPPHLRGQAAPAAPAQAGALPSAAAAAQPSVGQPGVVGGPRWAGIVNGGGGGGGGSVGGSRQGFGAGGRGGGGGGGGGAWNSRPGGWDRRDREPDPFANSEAAEVDFEGENTGINFEAYEDIPVETSGHDVPPPANTFAEIDLGDALNENIRRCKYVKPTPVQRYAIPISIAGRDLMACAQTGSGKTAAFCFPIISGFMRSRPPPRSRGSRTAYPLALILSPTRELSVQIHEEARKFAYQTGVKVVVAYGGAPITQQLRELERGVEILVATPGRLMDLLERARVSLQMIKYLALDEADRMLDMGFEPQIRKIVEQMDMPPRGERQTMLFSATFPKEIQRMASDFLADYIFLAVGRVGSSTDLIVQRVEFVLDADKRSYLMDLLHAQRANGTHGKQALTLVFVETKRGADALENWLYNNGFPATSIHGDRTQQEREYALRSFKSGATPILVATDVAARGLDIPHVAHVINFDLPNDIDDYVHRIGRTGRAGKSGLATAFFNESNTPLARPLSELMQEANQEVPQWLERYAARSSFGGGGGRNRRSGGGARFGGRDFRRDRGSGGGGYGGGGGGYGGGGYGGGGGGGGYGGGSSYGGGGQGFSSAWD

SEQ ID NO: 54629 - protein, 405 aa, Oryza sativa
MGSLFIRFQEAVKTLAKNPMFANNRLFARDPRHLQFEADVNRLFLYTSYYRLGANAEEKDAEEIIDMASKASVSEQQKQVQENVHYQLTNMCQAMDSILLPDTKNGASEANNYPRRSGLSFAVGTGVASANKPDVPSTRPLNRAELSNKFRDHFQYTLDIRPSQIPHKDAGQGLFLSGETNAGAVLAIYPGVVYSPAYYRYIPGYPKIDACNNYLITRYDGTIIDAKPWQLGGDSREIWDGSDLVDYNAVPSKSQESNSDRAWRMLSKPLKKGHTENFGEVLERRNPLAFGHFANHPPKGSTPNVMICPYDFPLTEKDMRVYIPNITFGGEEEPVTMKRFGSFWFKSGRSGNQEGESPVLKTLVLVSTRSICDEELFLNYRYSNSKKRPEWYIPVDEEEDKRRWS

SEQ ID NO: 54630 - protein, 571 aa, Oryza sativa
MPQSVLVDRATSESLIGPDWSLNLEICDILNHDPSQAKDVVKSIKKRIGHKNSKIQLLALTLLETLIKNCGDFVHMHVAERDILHEMVKIAKKKPDYHVKEKILILIDTWQEAFGGSRARYPQYYVAYQELLRAGAVFPQRPDSSVPIYTPPQTQPLRNLPPALRNTERQQEAPESSSTPEVPTLSLTEIQNARGVMDVLSEMLNAIDPGNREGLRQEVIVDLVDQCRSYKQRVVQLVNSTTDEELLSQGLSLNDDLQRVLAKHDAIAAGIAVRVEKPKSVQARGDKSPSIKPEGAKQPDQRSSEAASTVTPFEQLALPAPASSSSSKPPVEPAVGPSIDLLSGDDYFKPEPVNSQALVSVGNPPAASANNTLDLVDMFAQSNVGNNPNPAVTSSMLNSNPSLSEPQLYPSQQTVPPQQPSPYSNGLTSNTMAPYDQPSDINATGSWNSQFAHGMLPPQLPPQLPPQQPPNYGQGQDQSGDLPPPPWETQPAESDQFQPGQPRGLAMPSGQIGGIQSQPVQVQPGQVAPLQPMLTGQPTGMQFQQGFGDQLGAQQTQPLHTIWWNVSYNAR

SEQ ID NO: 54631 - protein, 69 aa, Oryza sativa
MGREELYSCLSVPRGGVGLIRVGGCSSYRCRLLGPLTLAVEGAAGGEVVETSSAVNAPLHHAQRCASLP

SEQ ID NO: 54632 - protein, 442 aa, Oryza sativa
MPMLVYFNADDLRKQAEASTKRFQQGNPISILDGIFIAIKDDIDCFPYPSKGATTFFDKIRSVEKDAVCVARLRKCGVLFIGKANMHELGLGVTGNNPNYGTARNPHSIDRYTGGSSSGPAALVSSGLCSAAIGTDGGGSVRIPSSLCGIIGLKTTYGRTDMTGALCDCGTVEVASPLAASVEDALLVYSAIAGSRPMDKLTLRPSPLCVPNLVSPDNNNILGSVKIGKYTEWFHDVSDRDISNTCEDALNLLCSSFGCQIEEIILPELEEMRTAHVVSIGTESFCDLNPHYRAGKRTEFTLDTRTSLALFGSFTSTDYVASQRIRRRIMYYHNEAFKKVDVIATPTTGITAPEIPQSSLKLGESNYVVSAYLMRFVIAGNLLGLPAITVPVGHDKQGLPIGLQLIGRPWGEASLLRVASAIEELCLQKRKRPSAFHDILNA

SEQ ID NO: 54633 - protein, 404 aa, Oryza sativa
MAGASSTSASARATPPARSLPPLGASGSQQEPAATASHHAAGAGASSRPMRRKGRKQKQLWPKTVLRKWLNIRSPESDFSADEGEATGDDDTDSEFEYEEMCHWERQLYDEERRLRGLGAETIDSQMEGAPYKLNRRRKSETLRAQYIDIKELRVCVGTWNVAGRLPPDDLDIQDWLDMEEPADIYVLGFQEIVPLNAGNIFGAEDNRPVAMWEHIIRETLNKISPDKPKYKCHSDPPSPSRFKPSDDVEDELVSESDSESGGEVHPWNEQDFTVDDDSVHSNKYEHSTSGPTETTVNGNNFSRVPSMKIFDRSHNLSFKDYVSSLEEPIHQKMLTKTLSYSERLGMIWPEQPLDILAQRLPDSTKPFISEKALRSCLSFKSAHGDSNAFPDDCLVHDFNIKVH

SEQ ID NO: 54634 - protein, 479 aa, Oryza sativa
MAAAAAAAPPFAAGDSPPPTALLLPRTTTTTAGAAPAPRRSSASSRLHLLLTAALAVATSYLLLILPRTPLSAAPAPAAAARAQVKLEKPVVILISSDGFRFGYQHKAATPHIHRLIGNGTSAATGLVPIFPTLTFPNHYSIATGLYPSSHGIINNYFPDPISGDYFTMSSHEPKWWLGEPLWVTAADQGMQAATYFWPGSEVKKGSWDCPDKYCRHYNGSVPFEERVDAILGYFDLPSDEMPQFLTLYFEDPDHQGHQVGPDDPAITEAVVRIDEMIGRLIAGLEERGVFEDVNVILVGDHGMVGTCDKKLVFLDELAPWIKLEEDWVLSMTPLLAIRPPDDMSLPDVVAKMNEGLGSGKVENGEYLRMYLKEDLPSRLHYADSYRIPPIIGLPEEGYKVEMKRSDKNECGGAHGYDNAFFSMRTIFIAHGPRFEGGRVVPSFENVEIYNVIASILNLEPAPNNGSSSFPDTILLPSE

SEQ ID NO: 54635 - protein, 336 aa, Oryza sativa
MALLGVLVGAVIIVVATAAAVSGSGLPVPGYDGLAIGFYHETCPQAEDLVLAEMREIVQEDRTLAPALLRFMLHDCFVRGCDASIMLKSREKIGERDANSSCSLRGYEQIERIKAKLEDECPMTVSCADIIVMAARDAVFLSNGPRYQVETGRRDGKVSCTIDADNDLPPPGSNIVDLKIYFSVKNLGWKDLVVLSGSHTIGRAQCGSFARDRLYNYSGEGRQDPSLNTAYAPELRKACVAGDPFDKTYVDMDPGSPYTFDLSYYRDVYRNRGLFVSDQALLNDKWTKQYVERMASADSTDEYFRDYAEAMTNMGRIEVLTGDNGEIRKVCGAYVD

SEQ ID NO: 54636 - protein, 434 aa, Oryza sativa
MQVLNTMVNKHFLSLSVLIVLLGLSSNLTAGQVLFQGFNWESWKENGGWYNFLMGKVDDIAAAGITHVWLPPPSHSVGEQGYMPGRLYDLDASKYGNEAQLKSLIEAFHGKGVQVIADIVINHRTAEHKDGRGIYCLFEGGTPDSRLDWGPHMICRDDPYGDGTGNPDTGADFAAAPDIDHLNKRVQRELIGWLDWLKMDIGFDAWRLDFAKGYSADMAKIYIDATEPSFAVAEIWTSMANGGDGKPNYDQNAHRQELVNWVDRVGGANSNATAFDFTTKGILNVAVEGELWRLRGEDGKAPGMIGWWPAKATTFVDNHDTGSTQHLWPFPSDKVMQGYAYILTHPGNPCIFYDHFFDWGLKEEIERLVSIRNRQGIHPASELRIMEADSDLYLAEIDGKVITKIGPRYDVEHLIPEGFQVVAHGDGYAIWEKI

SEQ ID NO: 54637 - protein, 105 aa, Oryza sativa
MPLLKRRPFFLLDPPKDLNPEDKVFQVRYTKEIFRDYQEYLNRVNLYRERVWTCKVSGKSNLTYEEALVSEHHAAEKAQQLPRELIAPVLHMIQYIFSKKTFLKD

SEQ ID NO: 54638 - protein, 168 aa, Oryza sativa
MVKVGGGGGAPGAASQAAARLPARQGKQWPGPSGALPAFLVPPSPSSRPVALVMPPMADAEEGLMRRQAAPSTTATATSGTTAVDGDDWRQRLATSTMMVALRRGFKMHGACVGGSVEVVAACAIVEKSRRRWGGGGESVWVSWLASDFWAGQIWLVEGGFGQPRMAA

SEQ ID NO: 54639 - protein, 351 aa, Oryza sativa
MRIPTTETETGTGTRSHRRRKGSSDGSRAVHRTDASRRGPTPTKETEIPGRPPKRSSLTLSLDDAGASNPASTWAILNRYGARRDSFRGDDRDRTTSAVSYTSGGDQISVSFELVKPPETSLLTLDWPQGPRPSAGTTSYPYVIAAHDNVVLFQIISPDKYARPSAIDYFVYNANSSSSSNHHPSLTRLPVSYWRRRDTLRPRIMSREGTCILSCSNNSPSFVVAELERRSCQSSETNIYLFASGSDDWRVFRNVPIRHGDGLAHLCWWTTDAVLSYHNRYMIWVDYLVAGMIVAKVAHPGRVDPPEPVLWYVPLPVDPVDGNPYDIDRGRGCPQASRSVCHPPWHQVRQC

SEQ ID NO: 54640 - protein, 373 aa, Oryza sativa
MEAAALGVPLVQVRAAVAAYGRGAGKGKGKRRVVGAFHAPPGRRRTALVAALPEPLQPLSPAQDGAVALASTEADGGEEVHGDVASAEISSPSGVLGKTVRVRFVLKRECTFGQSFHLVGDDPALGLWDPSKAVPLDWSEGHDWTVEKDLPANKLIEYKFVLQDLSGKLHWQNGRNRSVQTGETANILVVYEDWGNANSQTVEEEGKVSIGMEEGKLSVGMEEAVVPDDSESRDDIIVADELQVDDNLAVMQNESSVREDDKKSTVGTVTSVQAELMKLHEANQPELIVDEPQIQEALPETADTEPENGGVATCADDRYAESTDDDGVPVGGTDDDGVPVENRWTGAFEHELLWGWKALQQLLMSLGFKMDTS

SEQ ID NO: 54641 - protein, 263 aa, Oryza sativa
MQGDPGYGYGGYGYGYGYGYGGAGYDMAGYGGGGGGYYTSDPYNAAPAAYEDPLAVAGRRQHDFPAPLTGVEFQPSDTCPKNYVIFDQTYDRSRVMFHPSLANNLGNSGGGYDHHHHCGYGGFEQDYASKSAYYGVEDDGGGGCSIRQKEDTDEIDALMSTEDGEEEDDVLSTGRTPGCRAGGSPDSTCSSGASRSDCGGGRKPEAGGGERKKERMKKMMRTLKGIIPGGDRMDTPAVLDEAVRYLKSLKVEVKKLGVRGSSS

SEQ ID NO: 54642 - protein, 534 aa, Oryza sativa
MEEATGMEVGVSLEAGKPAAAPWGMLYYGVPALLVLGALYRAAERCWLGPRRVAGALQGQGLRGTAYRFPAGDLPENARRSKEARAKPMPPCHDIVPRVAPLLQDIVKEYGNVCITWFGTTPRVVIAEPELVKDILSNKFGHFEKFTLKSLGKLIALGLASYEGEKWARHRRILNPAFHLEKLKHMLPAFSTCCSEMIDRWDSKLAGSDGPFELDIWQEFQNLTGDVISRTAFGSSFMEGRRIFQLQEEQADRIIKTIQYIYIPGYLYFPTENNRRMKENSREIEGLLRGIIEKRSRAVENGELSGDDLLGLMLKSNMDSGEPSNLRMSTEDVIEECKLFYFAGMETTSVLLTWTLVVLSMHPEWQHRAREEVLSAFGRDKPNFDGLSRLKTVTMILHEVLRLYPPAVTLSRRTFKEIQIGGITYPAGVGLELPIILIHHNTDVWGKDAHEFKPERFADGISKATKTNQQAFFPFGWGPRICIGQNFAMLEAKMALCVILQNFEFQLSPSYTHAPYASVTLHPQHGAQIILTRL

SEQ ID NO: 54643 - protein, 166 aa, Oryza sativa
MGQPPVRSPRHHDGSSPPATLSTTGRPAASSPSPVDGDQKSQANRSNPVTSSNIAASCSRRSSSSIAATAMTSGATNLAGSGYCNDVRVSFVTAVAAAVPPGARTLPPPDTAQPHSPPPPLRPARRLRRCAPPAATLPHVARSRHHCREWTKRDDEGIEERKRERG

SEQ ID NO: 54644 - protein, 173 aa, Oryza sativa
MLLSSQVYSFKSVSMADLSPAPLQLDSGRAAGGQQGFSPINTGTEAADDVATGLEYGKVSSTELVQAVHDMLSAAGVRMDATKETLLQTTLSLQDQLKESQVALLVEQEKAEAAVREADVAKSAWSCRVCLNAEVNMTIIPCGHVLCNRCSSSVSRCPFCRTQVSRMMKIFRP

SEQ ID NO: 54645 - protein, 228 aa, Oryza sativa
MAIPLLLLLLLAMSTGSDGAFCVCKPDQSPAAMQKAIDYACWRGADCTQIMQSGACYQPSTIVAHCSYATNSYFQKNSPIGATCDFGGVATLTNTDPSSGTCKYPATASGVGTGMGTGTSTGTGTGVGTGGTGTGGAGVGAGTGTGVGTGTGTGAGMGTGAGAGTGITTPGSTTGTQGGALSPPFGGAYGPSAGAMNPDYNEAAPARSQLAAATSVLLAAAPFLFHLI

SEQ ID NO: 54646 - protein, 181 aa, Oryza sativa
MGYHLMGRPLKLAWFDPKDFAVLRDIPTRGERMPNYLMQTVCVTGFDSSLEIGTIRHALEEIFANDHMKKLVTPVNLDGTSTGKAYIRYDVASSYNGALHCDGVSEIGGRILRVTKWPDFSWCKKRRIGRAGCDKDDAGLAVPDQDDTPKWHTPSTGNMQRLLIFNCLTIIIGAALALICS

SEQ ID NO: 54647 - protein, 542 aa, Oryza sativa
MADPPSAAATASPQPDQLAAAAVSTPQNPNPNPLLSPQIPPSPTVSDLSAISSPQLDPSAAGGGAMDYPPRPPQMQAPSPGQAAAGAGGFGQIHRSGSGSRLAAVGQLPQYAAAAARMYGSQVNFSGGGGQVGQQQQQQQLLAARAAMLSQGQIGMLQGQGNAASAAHYGLQSQMMAQPRQKGMVQGAQFNTANAAQALQGMQSMGVMGGMRGNGTIPYNQQRFAHAQAQLRPQQTSQQGTLSPQVVGQGLTRTASIAALNPQLPGSSTNGPMAQMSLPQKQQQAAWLKQMQSSLGSPVSPQQFQHQQRMLLIHQLQQQSGLNQHQIAQTQQQHPHLNTQLLQQQHILQQLQQQQQSPRISASGSQKSMNLTGSQPGTPLSGGTMTGGSASQGAEVTNQLLGKRKIQDLVSQVDPLGKVDPEVEDLLLEIADDFIDSVTAFACTLAKHRKSSVLEAKDVLLHLEKNWHLSVPGFLREDKNPQRHPVKVSVDPQQPECDAAGIRSTGNKLVINNSVANHQTRPPVTEPSPMPTMGPLSKVPRF

SEQ ID NO: 54648 - protein, 198 aa, Oryza sativa; identical to SEQ ID NO: 51241

SEQ ID NO: 54649 - protein, 720 aa, Oryza sativa; identical to SEQ ID NO: 53935

SEQ ID NO: 54650 - protein, 353 aa, Oryza sativa
MVAITAPSSIEHIPLVRCPKGANAGPQAVIPCIDLSAPGAAAAVADACRTLGFFKATNHGVPAGLADALESSAMAFFALPHQEKLDMSGPARPLGYGSKSIGSNGDVGWLEYLLLSAGAASSGGAALPAALRAAVEAYTGAVRGVGCRVMELMAEGLGLGASEEGRCVLRRMVVGCEGSDEMLRVNHYPPYLLPPGRDRDECGVTGFGEHTDPQIISVLRSNCTAGLQILLRGDYSSPARWVPVPPDPDSFFVNVGDSLQVLTNGRFRSVKHRVLAPEGEESRLSVIYFGGPAASQRIAPLEQVMREGEQSLYREFTWGEYKKAAYKTRLGDNRLGPYELQHAAANDEAATKK

SEQ ID NO: 54651 - protein, 547 aa, Oryza sativa
MHAVHAYGCMQGSSVWGGGLQIRYLDRLIGSKGFASGIAVGESRHIYVAKVKNKKDKDEVFDELKAAGLKRPCSFTDISSENALLLEFETATDAAAAKAHIRRQLHPDVCSQDKNTSGHELFVRNIDNSVPDMEFINAFSRFGEVIRWQFNKLDGNCLIDYRSPNAAATAKSHLHGARFGLKSISVESRSVHDKTLSPSVPMLAPSVSDSSHHEIRNPRVSGYNAGFTVPTERPIYGPSAPRAPQGILPCPPVSAHRGPVIPPPPIQTSFVRPVYPGPGSPWENTTPNPSFSHASPRMMPGSSFRMNPPAPLPFIPSSVTPLTQFPGGSAQQSEKRPPPPPPPPNVAPPPFTRQDIPPPPPSPPPLPITQPPSVPPPPNSPPPLQPATDPSDSQKQRSHPRWQGSLSKSGLHYCSIYASRIELDACRYEHAVSEPTGWPSRLDVTKRTDYQHVKTTFSNTPPSKREVCRLLPCSNGDQKGFRDFISYLKQRECAGVIKIPSVKPLWSRLLFILPPTPEACGMLELPPHPTECLIALILPKETTAEAT

SEQ ID NO: 54652 - protein, 770 aa, Oryza sativa
MENRNKEDMGPSQRNSCPKVHSSMCSELTMMLDKVSSILPLIEAARPGCKAGIQELCNLYNIVEKGKLIIQHCVECSKLYLAITGEAIVSRCERIRDSLRRSLFLIENMVPPALANQIVDVHDDLGDIKFVIDPTEEEAGKTILEMLRQSDVTEELELETFLQAASNLNLTSPKSMLIERRAIKKLLDKISGTDPKKEGVLKFLLYLVKKYGKNIKPETGERNENMQSESQSSTPSSSFVSDTSTPGKWYTPTDIQRNEDQTSMSGAATPPAEFCCPISTKLMRDPVIITSGQTYERENIERWFREGYDTCPRTHIKLENFAMIPNTCMRDLIFNWCKEHGFIISDILPPSKNAYSYLPEQLHGYSMSSLHNVSVPLIAGKVRDFVIDHSTSSVALSEASYMSDSYHVRDMEEPKDSFSQFSWSADYQECLSFRNFNQDKFLRFFYELSKLPLELQDRSIGDLKIILNEENEASCAMVSNGFVEAFFDFLMNEDGSYSMQAQKVGFQFFRVFLSNSRTNILHMNEEAFRLFASFIDSELKTEALLTLHELVQHLSCRQSHLMASIITPLLESEDAEGLKLCLKIVCNLSSDSDVKPYLISLGIVSRLSPILSEGTFAECCLEILRNLCDVEEATVLITKTDRCLGSVAEYLDTGSPKEREHAVVILLAVCSHSSEDCLLVMKEGVIPALVDLSVNGIDEAKGCSMKLLHLLRDLRRTDQLNNSCSQEVVVTDVVEGPPDSSIHKQPIPKSSRFFQRKLNIFSKPRSLTLF

SEQ ID NO: 54653 - protein, 441 aa, Oryza sativa
MEEPPGKKGPAMDPAQDSGRDWLSGLPEGVLHRIMSFLDSRQAVRTCVLSRRWRDLWRSIPRVHADIYDFTPDGTIDGEGEEDVEEAEVVVVFNRFVDRLLERRDPTASIETFFFRCCIPDEDDDGSADANRWISYGLQKNAWFLEVVVQLNSLELDRSVFNSIYLRRIAFGNVFMDQGFFKQLQIGCPALERLYLDDCIVADDEISSNTLKVLTFDTTEFCYEHRISISIPTVTTLALRNTICGKPVLKDVASLVSASVVLYCVESGNFDAYDLRHYLWSFSHVKDLIFSYQGRKLTIENNLQWCPKFFNLVGLTLGKWCLNANFYALIVFLQNSPRLEKLTLILAEDNCKTSEVFIGELEEKSFTCEHLTSVEMKCWEDDPLVINVVDFFVGSGMSSSQIHIEYEDDDEDQFHIESDDMFGFEFEYEDEDEDEDEDEDE

SEQ ID NO: 54654 - protein, 735 aa, Oryza sativa
MPPPTPLARLLAAISAAASSPADLRRLSHRVLSPSAPLPPLRCLNTLLMALARHRMFPDMESLASRMPARNLRTYTTLINAYCLAGDIPAAKQHLTSLLHAGLAPDSYAYTSFVLGYCRAGMLTHACRVFVLMPLRGCLRTAFTYTALLHGLLGAGMVREAMAVFVGMRADSCAPDTHVYATMVHGLCEAGRTEEAEVLLEEAMSNGFEPNIVVYNALIDGYCNAGEMEHALKVFEGMDGNRCSPNVRTYTELIHGLCKSGKVERAMVLFSRMVEAGLEPNVVTYTALIQGQCNEGHLQCAFRLLHLMETNGLVPNDWTFSVLIDALCKREKVEEAQLFLGSLVKKGVKVNEVVYTSLIDGLCKTGKIDAADELMQKMISEGFVPDAHSYSSLIDGLCRQKKLSQATLMLEDMMEKGIQASPVTYTIIIDELVREVGSEGPKKIFDKMIATGINPDIVTYTVFVRSYCEEGRMEDAESMIVQMVDRGVFPNLVTYNTLIRGYANLGLVSQAFSTFEVMVGKGWKPNEDSYTVLLRLVVKKSSSDNSVDIWKIADMKDLQVLLEDITERQLPLAADIYSCFIRCLCRVDRLEEAKHFFMGMQNANLTPSEDVYTSIIDCCCRLKILTDALTLLDSMTKSGYLPHLESYRIIISSLCEGGNFRTAKEVFGDLLLKESNYDEIVWKILIYGLLQKGSVAEFSSLLSVMKEHGYQPSNTINAMITGEITVTNEVQEIAR

SEQ ID NO: 54655 - protein, 800 aa, Oryza sativa
MDMKARGMYVCRTLSYKGVDFDIVEAPLEERMMNMYRKAAEFWAEFRLELLSAGESFTEGISNQIWRLYWASHQRFFRHMCMSAKVPAVVKLAKEALAENKCVVVGLQSTGEARTEEAITKYGVEMEDFVSGPRELLLKLVEENYPLPPKPDSFQQGEEKVTEIHRKRHSAPDVSFKGRVRKVAKLVEVSDDDSDDYSPSESDHGSTESDEEFHMCQICNTEEEKTLLLHCSGCSRHVHPGCLTPPWTGVLTDDWSCYTCKKLEGEENEQDAHVADFSQRYDAAVEKKKKILDMIRSLDLPNNPLDDIIDQLGGPDNVAEITGRRGMLIRASDGKGVVYQARNAKEVSMEMINMHEKQQFMDGKKLISIISEAGSAGVSLHADRRAKNQRRRVHITLELPWSADRAIQQFGRTHRSNQTSAPQYRLLFTNLGGEKRFASIVAKRLESLGALTQGDRRAGPSLSAFNYDSNYGKKALTIMYRGIMEQDSFPVVPPGCSDNQSSIQEFIAEAKAALVSVGIIRDAVVCNGKVAGKLSGRIVDSDMHDVARFLNRLLGLAPKIQNRLFDLFTSILDVVLHNARIEGQLDSGIVDIKAKNVEMKESPKTVHIDSLSGAPTVLFTFTIDRGVTWETAKSMLDERQKDGAGSSNDGFYESKREWMGGRHFILAFEGSIEGMYKIIRPAIGEALREMPLTELKSKYRKVSSIEKVNKGWQDEYDASSKQCMHGSKCKVGSYCTVGRRLQEVNILGGLILPVWGTIEKALAKQVRQSHKRVRVVRLETTTDNQRIVGLLIPNSDVESV

SEQ ID NO: 54656 - protein, 783 aa, Oryza sativa
MSSRGGEDDDHASLLRSHPAAGAGAGSGSSSPCPSPRAVGGHHHNQHADVEAVGEATVTASPRRNGGVRGLLRHLDRRLSARGSGGRRSQQPPQQLDRPEPSPTSSPQQRERVGEELGDGAPPEWALLLIGCLLGLATGICVAAFNRGVHVIHEWAWAGTPNEGAAWLRLQRLADTWHRILLIPVTGGVVVGMMHGLLEIFDQLKLVKPPQKQGINFLAAIFPTVNAVQAAVTLGTGCSLGPEGPSVDIGKSCANGCSEMMENNRERRIALVAAGAAAGIASGFNAAVAGCFFAIETVLRPLKAENSPPFTTAMIILASVISSTVSNVLLGERPAFIVPAYELKSAAELPLYLILGMLCGAVSVVFGRLVVWFSNFFGYLKERYDFPIVVYPALGGLGAGLIALKYPGILYWGFTNVEEILHTGKSASAPGIWLLTQLAAAKVVATALCKGSGLVGGLYAPSLMIGAAVGAVFGGSAGYLINSAVPGNAAVAQPQAYALVGMAATLASVCSVPLTSVLLLFELTKDYRILLPLMGAVGLAIWVPSVVNQSKDGEPSRFRTPRRGYSSLSSEDRNSKSWRRGDSVNDLELTSLRTDNYDTYNEEMLLDDLKVSQAMSKSYVKIPTSAMVTEALKLLHDKQQNCGLVVDCEDFLEGIVTLGDIRRMGFELHGDSFTSGDQLKPAENSSTISLCLTRGFQYEGNERGLLTCFPDTDLTTAKNLMEARGIKQLPVVKRGVGHRTEGKRKLIALLHYDSIGHCLREEIENWKAIYQIKEDFHLIANGH

SEQ ID NO: 54657 - protein, 574 aa, Oryza sativa
MGSPGHGDAAERDIDDLPRNDANYTALTPLWFLERAAVVHPDRAAVVHGPVRYTWAETYRRCRRLASALAQRSVGPGCTVAVIAPNVPALYEAHFGVPMSGAVVNCVNIRLNAETIAFLLDHSVAEVVMVDQEFFTLAEESLKILAEKKKWSFRPPILIVIGDPTCDPKPLQYALGRGAIEYEEFLKTGDPEFAWKPPKDEWQSIALGYTSGTTSSPKGVVLHHRGAYVMALGVAMVWGMPEGAVYLWTLPMFHCNGWCYTWAMAAMCGTNICLRQVSSKAIYSGIVNHGVTHMCATPVVFNNLINAPASETFLPLPRVVNIMVAGAAPTPSLLAALSIRGFRVTHTYGLSETYGPSTVCAWKPEWDRLPLEERSRLHCRQGVRYGALEGLDVVDPKTMAPVAADGKSYGEIVMRGNAVMKGYLKNPKANAEAFAGGWYHSGDLGVKHPDGYIEVKDRMKDIIISGGENISSLEVEKVLYAHPAVLEASVVARADEQWGESPCAFVTLKEGADSSDEAAVAGDIMRFCRERMPGYWVPKSVVFGPLPKTATGKIKKHELRTKAKELGPVKKSRM

SEQ ID NO: 54658 - protein, 402 aa, Oryza sativa
MAKLPIVGRSAPRKPNESMRLLVVTVIGVMLGFFIGISFPAVSITKLHFPSSIVSYIEDKNSALTAQAILNHAWTAARNAKGNDTESSSDTAMKIYVPTNPRGAESLAPGIVVPESDFHPRRLWGNPDEDLPFKPKYLVTFTVGISQKENINRAVKKFSDNFAILLFHYDGRVSEWDEFEWSKRAIHVSVRRQAKWWYAKRFLHPDIVASYEYIFIWDEDLGVEHFNAEEYIKLVKKYQLEISQPGLEPDRGLTWQMTKRRGDHQVHKETEERPGWCTDPHLPPCAAFVEIMAPVFSRDAWRCVWHMIQNDLVHGWGLDFALRRCVDPAHEKIGVVDSQWIVHQVVPSLGNQGQSEHGRAPWEGVRERCRKEWGIFQTRIAEAEKSYYEMMGVPPPNVTFVH

SEQ ID NO: 54659 - protein, 484 aa, Oryza sativa
MATGEKAPRAFSMEELPGHLIGEVLTSGRLAAGDLARLEATCRALRPLAEHAASRLCAARAAFAAMGPAARGELLERCGGSWKKVLRFLQSVEQSSGTVHTSSGNMQVATGRYHTLLVHDSSVYSCGSSLCGVLGHGPDTTQCAAFSRVPFPSLSRVVNISASHNHAAFVTELGEVFTCGDNSSLCCGHGEVGRTIFRPTEIKALKGISCKQVATGLSFTVILTTDGQVYTCGSNTHGQLGHGDTIDRATPKIVELFEGLAPVVQVAAGASYTFAVTDDGTVYSFGSCTNFCLGHGDQHDELRPRAIQSFKRRNIHVVRVSAGDEHAVALDALGYVYTWGRGYCGALGHGDENDKTSPELISSLKSQVAVQVCARKRKTFVLTDEGSVFAFGWMGFGSLGFPDRGSSDKVMRPRVLDSLRDHYVSQISTGLYHTVAVTNRGIVFGFGDNERAQLGQEYIRGCLKPTEIMFQKSMEEIVIAAPSG

SEQ ID NO: 54660 - protein, 26 aa, Oryza sativa
MRYVFDPMKNVRGIWVISPAVGSYMA

SEQ ID NO: 54661 - protein, 726 aa, Oryza sativa
MEQQQKQEPGGGGGGVRVVARICPCAPPPPPPDAALNFQVAALNDPALISFIPRRPTASAATAAASGRGDGPKDKQQQQQQKYRVDGCYLRDDPNHRVFHNEVKPLIDGRGGGGGGRGGAKACVVACGDAAAKRHLFMGSPDQPGLFTMAMAQLLDSSKAIGAAVTVSSYQVLQDTHILDLLEPKNHEVLILEDADGQTHLKGLSRVGVNSIEEFSQLCCCATNQQRHHPAKDSTQLQDWGHQGLIIYVSSFDQQGKECALAKINFLNLAGYVDPKQKKNEGLALLTGNKSMHALMNVVQALNSNQRFVPYRQSKVTRILQDSLCKSKTSGSVLIACLAEDCCQDSVSTLALASRSSQVVNEQYYSLSLSAKKSSKSNMNLPTDAKTLSRTFIHKTMSMQEKNARPGFNNSGVKGGQTPTANRRTQPIISSTKKSGSSICTSIKMKENYAKPKISGRKLFCPSNNSLKEENATDVASTVVTETKSATVRIQADEVQPLVGMEIRAALLNEGCSEIGNTGDVKSSEMQEVVHCSTQELLASTIQEEDYALSNMEPENSCTDMGLTCSSITDNLVEKTPASSTLSSPKLSDRLREISNSLKLLSTRPVSVRAEKWDIECARRINTIAPEPKTPEVHLKFEQAEDPKDKLTARSTGIKKSLAQECLTFLNSANKEQLKSLKGIGDKRANYILELREESPELFKEISDVRDIIGMNSKEIKKMMSGIIDP

SEQ ID NO: 54662 - protein, 203 aa, Oryza sativa
MDASDQGCRLLGAQRSLHGLLGGGAMADVVLWRRKEVAGWSLAAVAASWVLFYCLPGYTLLSFVSSVLMIVLVVLFVWAKAARLLNRPPPPVPLIKISEDSMSKAAAAVGNILHKALQGFENIAHGKDSSLFYKMVSVLLLISIVGRVTDLITLVYACLVLALTIPALVDKYEENIAKFLNQASANIQACGQAWKAYKSKIKN

SEQ ID NO: 54663 - protein, 49 aa, Oryza sativa
MWKMNLLVNLTAKVAGKCTHGMNKILPLMMTVFIVINMSTLLLVLLKLP

SEQ ID NO: 54664 - protein, 315 aa, Oryza sativa
MASSLSVAVLLCLAAAAAAQLSPTFYDTSCPRALATIKSAVTAAVNNEPRMGASLLRLHFHDCFVQGCDASVLLADTATFTGEQNALPNKNSLRGFNVVDSIKTQLEGICSQTVSCADILAVAARDSVVALGGPSWTVGLGRRDSTTASMDSANNDLPPPFFDLENLIKAFGDKGFSVTDMVALSGAHTIGQAQCTNFRGRIYNETNIDAGYAASLRANCPPTAGTGDSNLAALDTTTPYSFDNAYYSNLLSNKGLLHSDQVLFNGNSTDNTVRNFASNRAAFSSAFSSAMVKMANLGPLTGSQGQIRLSCSKVN

SEQ ID NO: 54665 - protein, 913 aa, Oryza sativa
MAEAVLLAISKISTALGDEATRAVIAKLSGKVSNLRELPDKVEYIRRELRLMKDVIQDLDSTNTNMNVVKGWIDELRKLAYRVEDIMDKYSYYACQRQQEGSVMRCVRGAHYAGVFSEVASEVMKIKGDVEQVKRQQMEWLPTVQLISRTPTDIETPRSQGRRKLLECGDPVGIEYNRKRLLELLYPEEPGHKVITVSGMGGLGKTTLALDVFEREKIKFPVHAWITVSQTCTILSLLRQLVSPLIPMEQESSESKEDLINKMGVHELTKELNRRTENCTSCLIVLDDVWDQNVYFEIQGMLKNPQASRIIITTRMEHVAVLAPSECHLKIQALGEIDAFNLFCRRAFYNTKDHRCPLDLENVAASIVSKCKGLPLALVTMGGLMSTKLQTEHAWQQMYNQLRSELAKNDDVKAILKVSYHALPADQKNCFLYCSLFPEDFRISRESLVRYWVAEGFAVRIEHNRPEDVAEINLMELIHRNMLEVDEYDELGKVISCKMHDIVRNLALSIAGQERFGYANDYGAVEKVDWEVRRLSLFLNNGKGCASTVKFPHLRTLLETTTHPPGLLSSILSESKYLTVLELQDSDITEVPACIGKLFNLRYIGLRRTRLCSLPESIDKLSNLQTLDIKQTKIEKLPRGITKIKKLRHLLADRYEDENKSEFRYFIGVQAPKYLSKLEELQTLETVEASKDLAEQLKELMQIRSIWIDNISSADCGNIFATLSNMPLLSSLLLSAKDENEPLCFEALQPISNELHRLIIRGQWAKGTLDYPIFHSHGTYLKYLALSWCHLGEDPLGMLASHLSNLTYLRLNNMHSSKTLVLDAEAFPHLKTLVLMHMPDVNQINITDGALPCIEGLYIVSLRKLDKVPQGIESLASLKKLCLMDLHKDFKTQWNGDVMHQKMLHIAEIHVGW

SEQ ID NO: 54666 - protein, 273 aa, Oryza sativa
MSGNDDRSQAAAERIKAQALSAAKGLSRTQAERAAAAAARNVNAYGQKEEGPSRWQERKEAKRQMYLMSTEKAVILGVKPKAAQTSSSSGGAYTQCQKCFQPGHWTYECKNERVYISRPSRTQQLKNPKLKKTAAPVSYQFQNPDLEKEKEEERKLMKAKLKKEKSEKSKRKSKRKYRSRSDSDSSETSVFDSDSESSVTGSEYSSGSSSSYSSSDSEDKKRRPKRKQQKRRHRRETSSSASSESDSESASASDSDSDDKGSRKKSRKRSARR

SEQ ID NO: 54667 - protein, 658 aa, Oryza sativa
MYRLNVGGQAISPSKDTGGYRSWDDDSPYVFGAAFGVSYPKDDNVTIAYPSNVPEYVAPVDVYATARSMGPDKNVNLAYNLTWIMQVDAGFTYLVRLHFCEIQYPITMINQRVFNIYINNQTAFQGADVIAWTNNNGIGSPVYQDFVVTTVGSGAMDLWVALYPDVQAKPQYYDAILNGLEVFKLPLSNGSLAGLNPVPTVEPSLDGGAVKKSSVGPIVGGVIGGLVVLALGYCCFMICKRRSRVGKDTGMSDGHSGWLPLSLYGNSHSSGSAKSHTTGSYASSLPSNLCRHFSFAEIKAATNNFDESLLLGVGGFGKVYRGEIDGGVTKVAIKRGNPLSEQGVHEFQTEIEMLSKLRHRHLVSLIGYCEEKNEMILVYDYMAHGTLREHLYKTKNAPLTWRQRLEICIGAARGLHYLHTGAKHTIIHSDVKTTNILLDEKWVAKVSDFGLSKTGPSMDHTHVSTVVKGSFGYLDPEYFRRQQLTEKSDVYSFGVVLFEVLCARPALNPTLAKEEVSLAEWALHCQKKGILDQIVDPHLKGKIAPQCFKKFAETAEKCVSDEGIDRPSMGDVLWNLEFALQMQESAEDSGSIGCGMSDEGTPLVMPGKKDPNDPSIESSTTTTTTTSISMGDQSVASIDSDGLTPSAVFSQIMNPKGR

SEQ ID NO: 54668 - protein, 69 aa, Oryza sativa
MFSMMYYRNTSISHAGFQMIYYYDGFQMSNMLYNLLTIMILYYFFLCEFKLSYYHCFLKHIQYSSLICI

SEQ ID NO: 54669 - protein, 357 aa, Oryza sativa
MAARSCRFLYSSSSSPIATTSPLLSPTPSAATRRKLLLSSTCGTIASAAAASAMEGQGAPAAPGGKGSAIVVVDSHLHVWASPQQAAERYPYFPGQEPPIRGDVDLLLQCMDEAGVDGALIVQPINHMFDHSLVTSVLKKYPSKFIGCCLANPADDGSGIKQLEHLIVQEKYRAVRFNPNLWPSGQKMTNEVGRSLFAKAGELGAPVGIMVMKGISTYIQEIEELCTDYPKTTVIFDHMAFCKPPMNIEEEKAFTSFLELSRFPQIYVKYSALFRISREAYPYEDTSQLLSRVISSYGANRIMWGSDFPFVVPECGYKGAKEAISHVAGKIPVSSSDLEWILGKTVTQLFQGAWVSA

SEQ ID NO: 54670 - protein, 235 aa, Oryza sativa
MASTTAAAAGNGSGSILPTHTIAATAPPFRTHKDADLESRRRRRRRRCLCCCLLVTLVVLLVLAITLLVLFLTVLRVRDPTTRLVSTRLIGLSPRLSFPAMSVQLNVTLLITVAVHNPNPASFTYATGGHTDLTYRGAHVGDAEIDPGRIPSRGDANVTMALTLQADRFAGDLTQLVTDVMGGSVALEASTRIPGRVAILGVFKRHAVAYSDCHFVFGVTEMAVRSQQCSDRTKL

SEQ ID NO: 54671 - protein, 140 aa, Oryza sativa
MSFFTCLGTLSQSRSSSFNFSTLPMPGRGSNSAKDGRDQMIFSRYGGIGGSTQSISPPPLPPTHHHDFCFSSRQAAALPPTPRRRHRITASLPSPRRITASPRFPLVLPAGGGAGRATPEPPARYLFSHIFSVISFCQTD

SEQ ID NO: 54672 - protein, 521 aa, Oryza sativa
MESRGRRPRSPERQRPAARKVPVVYYLTRSRHLEHPHFVEVPVSSPEGLYLRDVISHLNMVRGKGMAAMYSWSCKRSYKNGFVWHDLGEDDLVHPATDGEYVLKGSELLDQSSSGQFYQGTNGNQKQQSRLKEGARLPLPREASYSSSPPSVIVREAKPRRSPSVPSLEEDDSPVQCRVTSLENMSPESEPQRTLLSRAGSASPAEFRVYKPTGCVDAATQTDDLGRRSVRKVPEMHKKSLSTDHDSVVREITEYRQSQPRRSAELQGIAREAMSQCHTPLSIPSSRGKSESLESLIRADNNALNSFRILEEDDIIMPTCPKLRPANVLMQLITCGSLSVKDHENIRLVEGYKPRFPNMKFPSPLISRTMMMGELDYLSENPRLMGMRLEDKEYFSGSLIETKMQRDVPADRYSALKRSSSYNAERSNETLDCARPDEDTVNTSHARCLPRTPILSSFLHPKSEAMKSPISDCRRSSSAGPDCSLASSGDGSKRFIDATGAPGSRIDSFRKEEKLVKIEES

SEQ ID NO: 54673 - protein, 319 aa, Oryza sativa; identical to SEQ ID NO: 52053

SEQ ID NO: 54674 - protein, 621 aa, Oryza sativa
MHNVGLAGLTFWSPNINIFRDPRWGRGQETPGEDPLLASKYAVGYVTGLQDAGGGSDALKVAACCKHYTAYDVDNWKGVERYTFDAVVSQQDLDDTFQPPFKSCVIDGNVASVMCSYNKVNGKPTCADKDLLSGVIRGDWKLNGYIVSDCDSVDVLYNNQHYTKNPEDAAAITIKSGLDLNCGNFLAQHTVAAVQAGKLSESDVDRAITNNFIVLMRLGFFDGDPRKLPFGSLGPKDVCTSSNQELAREAARQGIVLLKNTGALPLSAKSIKSMAVIGPNANASFTMIGNYEGTPCKYTTPLQGLGANVATVYQPGCTNVGCSGNSLQLSAATQAAASADVTVLVVGADQSVERESLDRTSLLLPGQQPQLVSAVANASRGPVILVVMSGGPFDISFAKSSDKISAILWVGYPGEAGGAALADILFGYHNPGGRLPVTWYPASFADKVSMTDMRMRPDSSTGYPGRTYRFYTGDTVYAFGDGLSYTKFAHSLVSAPEQVAVQLAEGHACHTEHCFSVEAAGEHCGSLSFDVHLRVRNAGGMAGGHTVFLFSSPPSVHSAPAKHLLGFEKVSLEPGQAGVVAFKVDVCKDLSVVDELGNRKVALGSHTLHVGDLKHTLNLRV

SEQ ID NO: 54675 - protein, 882 aa, Oryza sativa
MAPAQCARVQRVFHFGKGKSEGNKAMKDLLGGKGANLAEMASIGLSVPPGFTVSTEACQQYQAAGKTLPAGLWEEIVEGLQWVEEYMAARLGDPARPLLLSVRSGAAVSMPGMMDTVLNLGLNDEVAAGLAAKSGDRFAYDSYRRFLDMFGNVVMDIPHALFEEKLEAMKAVKGLHNDTDLTATDLKELVAQYKDVYVEAKGEPFPSDPKKQLQLAVLAVFNSWDSPRAIKYRSINKITGLKGTAVNVQTMVFGNMGNTSGTGVLFTRNPSTGEKKLYGEFLVNAQGEDVVAGIRTPEDLDAMRDHMPEPYEELVENCKILESHYKEMMDIEFTVQENRLWMLQCRTGKRTGKGAVKIAVDMVNEGLVERRTALKMVEPGHLDQLLHPQFENPSGYKDKVIATGLPASPGAAVGQIVFTAEDAEAWHAQGKDVILVRTETSPEDVGGMHAAVGILTARGGMTSHAAVVARGWGKCCVSGCSSVRVNDASKIVVIEDKALHEGEWLSLNGSTGEVIIGKQPLCPPALSGDLETFMSWVDEVRKLKVMANADTPEDATTARQNGAEGIGLCRTEHMFFASDERIKAVRQMIMASSLELRQKALDRLLPYQRSDFEGIFRAMDGLPVTIRLLDPPLHEFLPEGHVEDMVRELCSETGAAQDDVLARVEKLSEVNPMLDFRGCRLGISYPELTEMQARAIFEAAITMTNQGIQVFPEIMVPLVGTPQELGHQVDVIRQIANKVFTDMGKTIGYKVGTMIEIPRAALVADEIAEQAEFFSFGTNDLTQMTFGYSRDDVGKFLPIYLSQGILQHDPFEVLDQRGVGELVKLATERGRKARPNLKVGICGEHGGEPLSVAFFAKAGLDYVSCSPFRVPIARLAAAQVLL

SEQ ID NO: 54676 - protein, 174 aa, Oryza sativa
MSPAPRVLVLVVATVVALQVSPAAGRIPGAYGGGEWQSAHATFYGGSDASGTMGGACGYGNLYSQGYGVNNAALSTALFNSGQSCGACFEIKCVNQPGWEWCHPGSPSILITAPTSARPTTPSPPTTAAGATLLAPTSTSPCPCSSTSPSTAPASSPSPTAGCRAGRREGFGSR

SEQ ID NO: 54677 - protein, 647 aa, Oryza sativa
MSVAEVLRREVELVHPWPEWIGLMDRLAQQKYFDLGGTGGADEGCVAAAVPMDLAEVTQETGFDFSRDWTTVKNACMNFGRDRFDIVKSLPRKDLQVLVGHGCPSMDPKVVFSAKLIRKLVHLDEGDVCSSCNLRNLCSRGYILTRKEDEARTLDVMRILLFYGFDHVKETVENKPLLKLKSVKTVVRKLIHDIAKLSAVPIDPNLPPPIIRKPPPKVKQPPPPPKKRVGRDDVEMKKGDWLCPKCDFMNFAKNTICLQCDAKRPKRQLLPGEWECPRCNFLNYRRNMSCFHCEHNRPPDEYTNSQMEANQSVPRKRLERPAHKSEVCNAWNFDFDDNESDGADVAAFEFADSSKARNSLSVDNTSSRGGSKFSEDNEFGINETWREGTERRFSERERVGFDDFDDEEDDIDSYELDLSKGGQTDGMSRMSYLDFEDACDSADLNGRAKIRNSKHGEEEDIIGSPEDEEFDHPSLRSSHLAASWRKPVSCNGSNNHRRESFGSESDDGIISDLDGDINEGLKCKGGHNKHYPRRVVVRHNELDDVPFSDMDCDIGGCVQSDRRNRFSTKFSDEFHARASNSNRKKMNERFKSSDMRDGHPPFDRTRTRGTTELHDGSRDLQSNARRNWVKSGGFDDNNRPLRRLNRR

SEQ ID NO: 54678 - protein, 266 aa, Oryza sativa
MELNAKIAEHQRAIADQELAAQMEVPMVQQLEAEVNSLKQKLVEYNKKQLALRANATAINDKKEETHRKIAKSDFELVKLAQENSKLLSKIVQSPEKLQRALEEKKTARADLKNAEKIAMQSVQEKTATLEIYSKGYEKLSKHSSKIQALQEQFTATKALEKEVKARKAKISDESVEIMALDTKTIEWDGKVHEMEERVKAKEKERDQIVADENQKLAALRSEVEWKLKCLEPRERKVEETIAKATKLCAEVDSTRTDAAEELRLI

SEQ ID NO: 54679 - protein, 314 aa, Oryza sativa
MATLTVPAAVPPVAEDCEQLRKAFKGWGTNEKLIISILAHRDAAQRRAIRRAYAEAYGEELLRALNDEIHGKFERAVIQWTLDPAERDAVLADEEARKWHPGGRALVEIACTRTPSQLFAAKQAYHERFKRSLEEDVAAHITGDYRKLLVPLVTVYRYDGPEVNTSLAHSEAKILHEKIHDKAYSDDEIIRILTTRSKAQLLATFNSYNDQFGHPITKDLKADPKDEFLGTLRAIIRCFTCPDRYFEKVIRLALGGMGTDENSLTRIITTRAEVDLKLIKEAYQKRNSVPLERAVAKDTTRDYEDILLALLGAE

SEQ ID NO: 54680 - protein, 169 aa, Oryza sativa
MDPSGGGGGVGVGGIGGGEQILWDWQAAEQCESNAANHDVSRFMWDCLNQDDDDLLGLLGNQTPLRDCRGFFDIDDFTCKETLDLEESRESKRRRILEYPSESNQSEDGNREISSTLGTSEVSEISLLCTDEPQSFNWDSQNNSNNFGLSFVFHIILFDNLNCYAFFVS

SEQ ID NO: 54681 - protein, 527 aa, Oryza sativa
MQGANMLLDEPVRLTSVLTPVKPKVFPSLTKIVGTLGPNSHSVEVIQECLTAGMAVARFDFSWMDASYHQETLNNLRKAAQNVNKLCPVMLDTLGPEIQVHNSTGGPIELKAGNHVTITPDLSKAPSSEILPIKFGGLAKAVKKGDTLFIGQYLFTGSETTSSWLEVVETSGENVECLVTNTATLAGPMFTLHVSKAHVSLPTLSDYDKEVISTWGLHNSVDIISLSHTRSAEDVRELRSFLQSHGLQDTQIYAKVENTEGLDHFDEILQEADGVIISRGDLGIDLPPEDVFISQKTAIKKCNLAGKPVIITRVVDSMIDNLRPTRAEATDVANAVLDGTDGILLGAETHRGPYPVDAVSTVGRICAEAESVYNQLVHFKKLVKHVGDPMPHEESVASSAVRTAMKVKAAAIVVFTFSGRAARLVAKYKPPMPVLAVVFPREGSDPTKWRSYGTTQARQCFAARGVYPLMASTEEAETGGLTREEYGIKLAQNYGRSVGMLKPYDRLIIFQKIGDSSVVKIIECDSS

SEQ ID NO: 54682 - protein, 27 aa, Oryza sativa
MITCSRAIIKPLRCSPQAQDLLQYSVV

SEQ ID NO: 54683 - protein, 341 aa, Oryza sativa; identical to SEQ ID NO: 30254

SEQ ID NO: 54684 - protein, 270 aa, Oryza sativa
MTPSYSEQDCKPCVADCQWHIGGSMMQIFSLKLAEISNFATRAPGAGAIQLYGFMAVRNLLDPLRNYVFNRTRDNPFTIGDVSYPFIQMTGPKRGIAMNARVMIEYDMRIKMGESEQDDLLLVDGAATFSEITNFIPYIYRINGDCGMAVDIRLAHFSRAIEATAQVWVYKLKDGCGSLNLTITCHVSYMPPQIKLFQGPIDKLGDQNRFVVAAKLNTLMITEFKLVHQHDSISQRFESMVMPHGSKFHYAKLADLATIGVEIFWSILPI

SEQ ID NO: 54685 - protein, 104 aa, Oryza sativa
MIWPRPSFATPCSDRRRRISLPRWLHPAETSSGFGTTMGNNLVFKRSSSGDSHPKSMNGKRKLDDRIELGDNMISNIAPDCCYPESIYKRRRSNQQLEKLPEVC

SEQ ID NO: 54686 - protein, 264 aa, Oryza sativa
MQGYGDQHPAFAGRAMGGFQMPEPSTTPGPFNTGLSRNEGTIPGIGVAMPLDGSDHGEQRPSIPGLPPGQPPLPPGPHPSLLAGGQQQQYQQMQQQHPQFPRPPPPNMPQLQPPAHMLPHAQGSRAPLPQLPSMSGPPPVNPPLPPMPHPMAMQVQGSSNQMMPQMPQHLIGMNQTHQGPPSNMPPMGGFPNGMGNIQGGSSASGMQNFPMGGMYNRPQGKMPPQAQAQMTSIPGLSSYQPGMGNVGLPPPPPQHPPPRGSAPQ

SEQ ID NO: 54687 - protein, 425 aa, Oryza sativa; identical to SEQ ID NO: 50034

SEQ ID NO: 54688 - protein, 229 aa, Oryza sativa
MGSRLGRRVIHFANLPLKLMLPPAPLSSVQEFAVKTVPSASKVDIRRCLESMYGLSVAEVRTLNMEGKKLRRGPFLAAKPDYKKAYVTLRAPLPVSPDLFPIGLVLGERERKASAAAARRKAVEGAEVEGEGKGKHWMEDEKVGFSRAGRGKVVYGNPGRLGKKRNGGTKVKDRAGEEVGKFPWSGTRLATEKKPARKQQYAPKKKGIVLKQKSWKGSVHRQPKKKVEA

SEQ ID NO: 54689 - protein, 925 aa, Oryza sativa
MPSRMMQAFAQEASDFDRQMGCMAGMFQIFDRRRLLTARQRGGARGTAPPGHVLPNSNSNVSIQNPVASNNTLDKTFSKSMTENSSLSMESSRASSSSSSCSSFSSTDINRPIQQELSYINKERFAGKPPRSSQTKSVKCSKTEAKTKDPHTGFRDIVKESINRETHGMTIKTSTKESRKGLHKDSPRPLLISKSTDGTYVIGIDRSTGVPGYVHESSRPPRFSCDDRQLLRSVEAQDSKKPSAKLKELPRLSLDSRKESMNPCSRLKNSGYIRTDDNLLDVLKHQESPSHQRASSVVAKLMGLEGTTPDIHETARSPTPVHGTQIDQPSHCQRIKNQDHSVPVQKNHSPVLKTNPSPRIIPEAAPWRQNERAVTGRAAEVKPRTASIYADIQRRLRGLELSECNKELRALRILSTLHKKDGPSQSDNNPELTAIQKKASEQIVDSENFQSPIVIMKPARCITKPDASDTLVAPLSRPKGIRRLRHEETSFTRKNENSDSKRNHSPNESAHSSGEEPVNSARSPRLSSSLSPRLAQKKADSERRSRPPVLPTSPGKKSKETVSPRGRLRSRHSQTKSNSDNDNVLHIPETKINLAKQIDVGVVDHPNPLNANSPYIHQSKIASTPNREEMPTILPADKKKIHPQENIPSPVSVLDATFYHEGSSPSLKRISDSFKDGETHTSDESWNPTSLPDTPPSKASNDGNQIKAENMKALIQKLELLQMLSEEALKTDDTFSSVAANKDHQYLYEILSASGILHNKLNFQMMPHQLRPSSYPINPELFLILEQAKPDEEKLHRRLIFDLANELLAQQMDANHTVNSSVQFFQSKKLSGWQLFKDLCAEIDMIQSRSSMIRCSEEEDSRLAEDAMQGMKEWKSSDSERQGIVLAIEKSIFKDLIDEIISGVDKGKVHLTQWKLRRQLSFISI

SEQ ID NO: 54690 - protein, 410 aa, Oryza sativa
MDGGSSTAARSSAAEMEEHQNWKKNAPVLYDLVISQPLEWPSLTVQWLPSHSRSPGSARSHRLVLGTHTSDETPNHLLLADAALPLPPRLAAAAAAAGGAVPAPSVSISRSVPHKGEVNRARCMPQRPYTVATKTCVDEVHVYHLGDGGEKGGADVVLRGHEAEGYGLAWSPMKEGLLLSGSYDKKICLWDLAAGSGASSLDAHHVFEAHDDVVEDVAWHLKDENLFGSAGDDCKLMMWDLRTNKPGQSIVAHQKEVNSLSFNPFNEWILASASGDATIKLFDLRKLSRSLHVFDSHDSCRGEVFQVEWNPNLETVLASSAADKRVMIWDVSRIGDEQAEEDANDGPPELLFVHGGHTAKISELSWNPTQKWVMASVAEDNILQIWEMAESIYCDDNYLHDNDDDSCPAT

SEQ ID NO: 54691 - protein, 216 aa, Oryza sativa
MSDLRELGMRREPSRAEVVGRAKDDGDFDALRRAIIRKVKDNEVLRSNIIAEVKQSVVINEDGSEKLKLKDLSDAIYQDIGSKIMGQISDEIWGVILSNEIDIRGTSETVYNRMMNPEQQQDPPSKKLKRNAKEEQVSPAKASTSVAVQLEDDDPEEPPGFGFSDHQRSNIMATQQQQSSNTENHNQVKPNEGEPNAVSCPGDDDEEDPDVPPGFG

SEQ ID NO: 54692 - protein, 295 aa, Oryza sativa
MGNASGREEDPAAAAGEGDVEDSSVRSSERGFPPYGGGGNHVRRACSVGVVGGGGGAGSPPGSPGRSLSPRMFVPQTPVPPLQRAADVTPVFNRILMNEQEEEFDGPPQKEIPVLIVWTLGGKNVSVEGSWDNWKSRKPMQKSGKDHSLLLILPSGVYRYRFVVDGERKCLPDLPCETDIMGNAVNLLDVHDFVPESVESVAEFEPPPSPDSSYSIQAPEEKDFSKEPPVLPSQLHLGVLNSQNSDESCARPQHIVLNHLFIEKGWGAHPLVALGLTHRFESKYVTVVLYKPIER

SEQ ID NO: 54693 - protein, 894 aa, Oryza sativa
MTASVVSSVLQRLGDLVIQEATFLSDVPRQVSSMKAELSQMQCFLNVVDAKCLEGNSMMKNLASNIQDVAYRVEEVIDNAHFIFRRRKTSVSKYTHIFGDSIDLREVGKNIQVIRKEISEIFERYNRYNAVNSSTSTEAQPIFREDEDFYAQRLVPPGLDQGMDIVGFDHEIAQIKSYLLDQNNMNLTVISIVGQAGAGKSTLAKLAYSSVITEGYFHKYGWVSISPKYSALEVLRDLVRQIRGTGKISERKSMHLNFYGETEVSKLIFDFLKEERYLIVLDDIWTTDTWDKIKSVFPDKGNGSRIILTTRDMEVGQHPKTKVQIHTPDLLDEDKSWELFQKKAFPHDVQFTELEVVGKKLSKKCNGLPLALVVLGCFLSRNHNIHTWEKMVASVDWEIMKKEGDVGRILALSYHNMSNNLKACFLYTASFPEDYPITVHVLKKVWIAEGFVPNIRGYTQEEVAYRYVEELAQRCMIQIEERSKNIGWIKKIKVHDVLREWGIGQARKEGFLKVCSSGTDVETYYADEQRCYRVAFHGYFDNEVGKSVLNLRSVLAFNPDGKRLFSFNGLHLLRVLHFCSSLKTCTLPEEINKLVHLRYLGLEGSTVFMFPSYMKGLRNLQILEASTATVKALPSSLWSIAALKHVHVYQVLHWKAQEIRTKRSLQTLYVFSIMQCDALTWKRTIRSLQKMSQHVSWCLGIASTKRVKEKETQEHEEYNLDIRVDALESKVDGLELSGCFKERHVLNDVLPHHNLFPNFLLQLKISCPNILNDDPMPILERLPRLEVLEIVNSSYTGKRITCSSEGFLALRSLVLMDIGLEEWNLQQGSMAFLAVLTLKCTMLRSISNVLHQLDDLVELRLICMPQLSVDDHEPARGRGCRVMISVDEEQTSDT

SEQ ID NO: 54694 - protein, 332 aa, Oryza sativa
MAASTSQHALVSVKSLCTGANFGFEKRTSKVRFVLVGRCCSGTRKLGLVCASNSHSSVMEPAQLPLSPESGNTPKKSSESALILIRHGESLWNEKNLFTGCVDVPLTPKGVDEAIEAGKRICNIPVDVIYTSSLIRAQMTAMLAMMQHRRKKVPIVVHSESEQAHRWSKIYSEETKKQSIPVITAWQLNERMYGELQGLNKQETADRFGKEQVHEWRRSYDIPPPNGESLEMCAERAVAYFKDQIVPQLVAGKHVMIAAHGNSLRSIIMHLDKLTSQEVISLELSTGIPMLYIFKEGKFIRRGSPAGPSEAGVYAYTRSLAQYRQKLDNMFQ

SEQ ID NO: 54695 - protein, 277 aa, Oryza sativa
MASAKVENRGGGGFGSKRSRNDVSVREGDWTCPQCGNVNFSFRNVCNRGACGAPRPSPSLSPRVPPPPAAGYDRPHLGYDRPHLFYGSAGTPPPIPLGSGSYGAPYPHLGLRYGYGPPVGPPASYGLFSSYGQPGPMGSPMGGMGYGPGPELGRYGYGFRGSPMPVSSPWSGGALVENNDSSASRKRRGGPDGMAENDWICPKCENVNFSFRNSCNMKKCGAPRPSPGSNATPCRKDKDAPEGSWTCPECNNLNYPFRTACNRKGCGSSRPAAATAN

SEQ ID NO: 54696 - protein, 377 aa, Oryza sativa; identical to SEQ ID NO: 35248

SEQ ID NO: 54697 - protein, 606 aa, Oryza sativa
MPDAALDAFRALPSILGCNPGIRSHNALLDAFVRARRFSDADAFFASLSHGAFGRRIAPNLQTYNIVLRSLCARGDLDRAVTLFDSLRRRQVAPDRITYSTLMCGLAKQDRLDHALDLLDEMPRSRVQPDVVCYNALLGGCFKAGEFEKVMRVWDKLVKDPGARPNLATYNVMLDGLCKFGRFKEVGEVWERMVANNLQPDVITYGILIHGLCRSGDVDGAARVYSEIIKTGLVIDAAMYNSLVKGFCQAGRVQEAWKFWDSAGFAGLRNLRTYNIMIKGLFDSGMVDEAIELWDLLEKDAACIPDTVTFGTLIHGLCQNGFANKAFTIFEEARVSGKQLDVFSYSSMINGLCNVGRLVDAVKVYEKMDKDGCKPNSHIYNALISGFCQVYRTSDAVRIYSKMADNGCSPTVITYNTLIDGLCKAEKYQEASSVAREMVENGFTPDITTYGSLIRGLFSDKKIDDALSIWKQILYKGLKVDVMMHNILIHDLCSAGKVDEALHVFSDMKEKKNCPPNLVTYNTLMDGLYETGYIDKAATLWTSITEDGLELDIISYNTRIKGLCSCDRIHEGIQLLDEVLSRGIIPTVITWNILVRAVIKYGPIQV

SEQ ID NO: 54698 - protein, 151 aa, Oryza sativa
MVDSCDVMVQGAMRVPGAQDRVPRGGVLEPCVLRGAGGVRGRRRRRGAGGPDGVEDGARAADGEVDADEGVVGLHLEAGHQPQAPGPLLHPHPQRVRQDARRQQRHPGQLEAQHILPLLRPVQLNRRSPAATLGAGIAAAAAASNTTTAMM

SEQ ID NO: 54699 - protein, 384 aa, Oryza sativa
MAAYCSRVYHHHPVSPSTMQGSLARPSIHAGSASLTFRARPNSVSIVRCDADSPPEGSAVAGWAPPGPYTGRDPAARKPAWLRQRAAQGEKYARLRESLGELKLNTVCVEAQCPNIGECWDGGGGAGGDGDGIATATIMLLGDTCTRGCRFCAVKTSNKPPPPDALEPLRTAVAVASWGVDYVVLTSVDRDDLPDGGSGHFAQTVKALKELKPGILVECLTSDFRGDLEAVSSLASSGLDVFAHNIETVRSLQRIVRDPRAAYDQSLAVLKHAKNCKDGMVTKSSIMLGLGETDEEVKQTMCDLRAIDVDILTLGQYLQPTERHLRVREYVTPEKFDFWKEYGESLGFLYVASGPLVRSSYRAGELFVQNLVRRKKAELAPTLQ

SEQ ID NO: 54700 - protein, 188 aa, Oryza sativa
MLLIVGLCMAVQAFFPCGAAYVNILSSYEDGSTLLWDVRNPGLPVSSVKYHSESALSIAIDGLCNGGISGGADDKIVMFGLDHQKGAFILRKEIKLERPGIAGTAIRPDNKIAATAGWDHRIRVYSYSKGNALAVLKYHSASCNAVTFSSDSKLLASCSADTTVALWELYPPKTDSQVGLKTRDEISQ

SEQ ID NO: 54701 - protein, 260 aa, Oryza sativa
MEVDHADRDGARRRCREYLLALEEERRKIQVFQRELPLCFDLVTQTIEGMRSQMDAAGSEETVSDQGPPPVLEEFIPLKPSLSLSSSEEESTHADAAKSGKKEEAETSERHSSPPPPPPEAKKVTPDWLQSVQLWSQEEPQQPSSPSPTPTKDLPCKPVALNARKAGGAFQPFEKEKRAELPASSTTAAASSTVVGDSGDKPTDDDTEKHMETDKDNRQGRQGARTRKASRSLTGSLAGAGRRSSTAASCKRCSSWAGPM

SEQ ID NO: 54702 - protein, 391 aa, Oryza sativa
MSAATPDSAAAAKRPIDPSHADPSPAAKLQRSSPPDPSPPAEAQGDATDGGGEVAGVRSGEMAGARNPQAQRYLVAVEYVGTRFSGSQQQLNQRTVVGVLEEAFHKFIGQPVSIFCSSRTDTGVHALSNVCHVDVERISKRKPGEMLPPHEPGVVKRAVNHFLQKNEGDIMVTDVRCVAPDFHARYKALERTYHYRLLSGSEPLSVFEKTSAWHIPEDLNVQAMKKACSILVGHHDFSSFRATGCQANSPMRTLDELSVTEVFPSMFFPSSMERSEMESLDGHLVYSRTSVVESSGKGSDASSTSEQSRFENGEEFGKRLRHRCFVVTARARSFLYHQVRLMVGLLKSVGTGDLTTEDVERILNLKAVTAAPPMAPACGLYLANVKYDLSV

SEQ ID NO: 54703 - protein, 442 aa, Oryza sativa
MFKFLKEVVAGSGSGLKDFPYTIGEPYASAWGSWTHHRGTSKDDGSPVSIFSLSGSNPQDRHLVAGRNGVKRLRTVRHPNILSFLHSTEAEVPDGPAMKHTIYIVTEPVTPLSEKLKELNLGGTQRDEYFAWGLHQISKAVSFLNNDCKLVHGNVCVTSVVVTQTLDWKLHAFDVLSEFDANNEASNSPMLQFEWLVGTQYKPMELTKSDWVSVRKSPPWAIDSWGLGCLIYELFSGAKLTRTEDLRNTASIPKSLLPDYQRLLSSAPSRRMNPSKLIDNSEFFQNKLVETIQFMEVLNLKDSVEKDSFFRKLPNIAEQLPREIVLKKLLPVLASALEFGSAAAPALVVLLKMGSWLPADQFSAKVLPTIVKLFASNDRAIRVSLLQHIDQFGESLTAQTVDEQVFPHVATGFSDTSAFLRELTLKSMLVLAPKVRPSQPSA

SEQ ID NO: 54704 - protein, 463 aa, Oryza sativa
MEIVRSHRQIAAEAAAGVGCGGGAGGLPTYRVAPQLEVRLEEFELFAIDRLRVLKGIADGLSRGKRPEEMEKLVKELWKAHMRHQDPTETLNKDIISHFVLRLVYCRTEELRKWFLSMETTLFRYRFRLESPESQRMLMSEFRLPYKALPHSEFEAVKDKLSQVARTIGQSAAVESVFFKVPFEEVPDLVASRRVFLSKGYAYVAMSQVVSLVVTQFRCNISKALVLTNRKWTATIKEQEKDRLTPIVEALSNAYFGPDYSQPKDAVEISLKDIDQLAKTSFPLCMRHMLEKLRENHHLKHGGRMQFGLFLKGAGLKLEDALAFWRAEFSQKVGSERFDKEYAYSIRHNYGKEGKRTDYTPYSCQKIISATPGVGDHHGCPYRHFGEDNLRAALNKMGISGHPLEEIMDKVKNRHYQLACTMTFEAEHGVSCDTGINHPNQYFSESQKVLKAKNQAVQSQGTT

SEQ ID NO: 54705 - protein, 329 aa, Oryza sativa
MAAAAAAETSEASTAGLALAESNINWQRLDKTRFHVIGAILFTAQQGVLHPTAVVKTRMQVAEGGLSHMSGFSVFRRILRSDGIPGAFRGFGTSAVGALPGRVFALTSLEVSKEMAFKYSEHFDMSEASRIAVANGIAGLVSSIFSSAYFVPLDVICQRLMAQGLPGMATYRGPFDVISKVVRTEGLRGLYRGFGITMLTQSPASALWWSSYGGAQHAIWRSLGYGIDSQKKPSQSELVVVQATAGTIAGACSSIITTPIDTIKTRLQVMDNYGRGRPSVMKTTRVLLEEDGWRGFYRGFGPRFLNMSLWGTSMIVTYELIKRLSVKPE

SEQ ID NO: 54706 - protein, 300 aa, Oryza sativa
MRILRGILAVSGHLAGRRAPANNAHLALFSRALQILAQQEPVRLQKLSAPDSGIVEMRLERPEARNAIGREMLQGLRSAIEKVKADATAKVVLLASSVPKVFCAGADLKERRLMSPCEVREFVNSLRSTFLSFEALSIPTIAIVEGAAFGGGLELALSCDLRICGENATFSLPETGLAIIPGAGGTQRLPRIVGKSRAKELIFTGRRFDAVEAVTMGVVNYCVPAGEAYKRALELAQEINQKGPLAIRMAKKAINQGMEVDLSAGLAVEEECYEQVLHTQDRLEGLAAFAEKRKPVYTGK

SEQ ID NO: 54707 - protein, 83 aa, Oryza sativa; identical to SEQ ID NO: 54098

SEQ ID NO: 54708 - protein, 347 aa, Oryza sativa
MGGYENGDSPAAAAGDGGVILGVDGGTTNTVCVCLPVAMPPPESPGAVPVLSRAVAGCSNRNSVGESAALETLEQVMAQALTLVNTDRSAVRAVCLAVSGVNHPSDQQRMLDWIRDLFPGHVKFYVENDAVAALASGTMGKLHGCVLIAGTGSIAYGVTEDGKVARAAGAGPVLGDWGSGYGIAAQALTAVVKAYDGRGPHTNLTREILRKLELSSPDELIGWTYADPSWARIAALVPVVVSSAEDGDEVANKILHDSVQELADSVVAVVRRLKLCGEDGMDQFPLVLVGGVLEGNKKWNISGEVVRCISKVFPGVHPIRPEVEPAIGAALLAWNHHRKGLKLENGS

SEQ ID NO: 54709 - protein, 317 aa, Oryza sativa
MSMTNLRRRLHHGDVDGRKNEHVDISSVDSLNEPLLGKSSSDTGGSEVYDPRRQDLWDDDRKKEQLHWSFLFSNLIAQWAQWLANIIVGSGSLFGRLFPFSLDNQNSSPVYLSPLQEDRLNTLRSRLQIPFDGSRVEHQDALRQLWRLAYPNRDIPPLKSELWKEMGWQGTDPSTDFRGGGFISLENLIFFARNYPGSFQALLNKVQGQRADWEYPFAVAGINISFMLIQMLDLQSSVPSSKSGVRFVELLGRDENAFDHLYCIAFRLLDAQWLVKRASYMEFNEVLKSTRTQLERELVLEDVLEVKDLPSYTMLDK

SEQ ID NO: 54710 - protein, 460 aa, Oryza sativa
MATRRDGSSRREGLTAEEDGGEDWLSTLPDEILHNVLSFLPAHEAVWTCVLSRRWRNLWRSAPVLRIRNAKRWGGMAKFDKFFNNLLLLRDPVPLDELEFQTVLGICKLHPLQPSFRLLKYANTWIRHALMCNVRVLRVLVQYQYDLPLLKVNMPLISEHLKTLELRRVLLDKRALDFSSCPSLEELEMNFCGNSTTNKIFSQSLKRLCITDGRFTDDLSSLPALQDLEMESCGICTEKLVCQSLKHLCFTRCHFEEPTHISAPGLISLQLNDIWGWTPSLETLPLLVTASVKLGKESMGCCSECTFHPGTCADCDGDPDSSFKCEFLRDLSNAVNLELAAEDGMCMFKQDLTWCPRFSKVKTLLLDGWVVGHDFYAVVCFLQHTPILEKLTLQLCEGHERMVEIEESSRSVGRMVQFEHLQTVEVRCLRNDEWVHKILKILNTYGITPDKITIQIQDSV

SEQ ID NO: 54711 - protein, 461 aa, Oryza sativa
MARRAASRAVGSEGSIQGRGGRAGGNGAEDARHVFDELLRRGKGATIYGLNRALDDVARHSPADAVSRYNRMARAGADEVTPNLYTYSVLIGCCCRAGRLDLGFAALGNVIKKGFRVEAITFTPLLKGLCADKRTSDAMDIVLCRMTQLGCIPNVFSCTILLKGLCDENRSQEALELLQMMPDDGGDCPPDVVLYNTVINGFFKEGDPDKAYATYHEMFDQGILPDVVTYSSIIAALCKAQAMDKAMEVLNTMVKNGVMPNCRTYNSIVHGYCSSGQLTEAIGFLKMMCSDGVEPDVVTCNLLMDYLCKNRRCTEARKIFNSMTKCGLKPDITTYCTLLQGYATKGALVEMHDLLDLMVWNGIQPNHHVFNILICAYAKQEKVDEAMLVFSKMRQQGLSPNAVNYRTVIDVLCKLGRVYDAVLTLKQMINEGLTPDIIVYTPLIHGFCTCDKWEKAEELIF

SEQ ID NO: 54712 - protein, 472 aa, Oryza sativa
MADAPSPVLTLQVKKGRRGGETRQWRAGAVLRVGRVATGNDIAVRDAGASQRHLSIEFLPPPASRWAVSDVGSSNGTLLNGSPLVPTVPSPLSDGDVIKIGESSMLVVSIGPDSDPNPGPRRSSRQSAAVVGEQEKPPAVTRRGGRKNAAAAAVAVEPPIAEKEEPEPEEAPVVTRRGARKKAAQPPKAEEHEEGEEEVVAAVVTRRCGRKKAAEPPKPDEEEEQEKGKDEEQEEKEEEEVPVVTRRGRSRKAAPEAAVAPPPPRARSTRAAARRGKAVDTSLDERESEMAGKGRGRATRSNARKCRMAVPEDDDDDGEQQEGATAVAEEQIKDQPRAMAVTDGEEEDDKVEAMDGEVEQNDKASEEEEVPVARRGRARRAPKGKATASSNAHAASDNAVEEEDGGRGEGAAVEVEGESSGSSSLETMTLREWFQRMNVYLPRMINEAAEEALSALRERHRRIDEYISTLED

SEQ ID NO: 54713 - protein, 330 aa, Oryza sativa
MSCAKIAGRDKLKRRGDWLSSSTGPDDANLLTPKIVSSDSASEKCGGDCSENSANSPPLDLPLSFPLLPSLFPLATQYPLPKDSTEQPFKPYYCWCPPCPSSLQYSVTPLHMPVTSVEPLPLPPLSSLLSNDQPPTSTVSAKMDTTDLPSLNLPSILRDPLLHLPLPTSPLVSLHGSQVPTFTPLMSDPIVHVPVIDVCSSGQAYLVSCGPSMSATVTLLPSLKPLIPETESLVERSARETLMRLIASTPSASNPQLVNILPAVLTDVPEMNVRKHLGVHPGDRLSSSCSVDVIGPGFAVTEDDASVGDGAHATFAEYDDIGDQQHFQSM

SEQ ID NO: 54714 - protein, 403 aa, Oryza sativa; identical to SEQ ID NO: 52780

SEQ ID NO: 54715 - protein, 954 aa, Oryza sativa
MEGAIFSVAEGTVRSLLSKLSSLLSQESWFVRGVHGDIQYIKDELESMNAFLRYLTVLEDHDTQVRIWMKQVREIAYDAEDCIDQFTHHLGESSGIGFLYRLIYILGKLCCRHRIAMQLQELKARAQDVSERRSRYEVMLPKTTLQGAGPRLTRHASRHLDPQLHALFTEEAQLVGLDEPRDKLVRWVMEADPCRRVLAIVGFGGLGKTTLARMVCENPMVKGADFHCCPLFIVSQTFNIRTLFQYMIRELIQRPNKAMAVAGGKHGHTMDGNMDGMERWEVAVLAEKVRQYLLDKRYIVIFDDIWTISAWESIRCALPDNKKGSRVIITTRNEDVANTCCSGPQDQVYKMQRLSDAASRELFFKRIFGSADISSNEELDEVSNSILKKCGGLPLAIVSIGSLVASKTNRTKEEWQKICDNLGSELETNPTLEVAKQVLTLSYNDLPYHLKACFLYLSIFPENYVIRRGPLVRRWIAEGFVNQRHGLSMEEVAESYFDEFVARSIVQPVKIDWSGKVRTCRVHDMMLEVIISKSLEENFASFLCDNGHPLVCHDKIRRLSIHNSHNSVQRTRVSVSHVRSFTMSASVEEVPMFFPQMRLLRVLDLQGSSCLNNSTLNYICKFYQLKYLTLRKTNIGKLPRLIGNLKYLETLDIRATRIKRLPASASNLSCLKHLLVGHKVQLTRTTSVKCFRPDSGLEMTAGVVKNMMALQSLAHIVVKERPAVLSEIGQLQKLQKLNVLFRGVEENWNAFLQSLVKLTGSLRSLSIHILDEKEHSSSLEYLALIAESPPLFIRNFSLKGKLQRLPPWIPSLRNVSRITFRDTGLHAEAIGVLGDLPNLLCLKLYQRSYADDHIFFAHGNFLKLRMLVIDNMENIRNVHFEKGSVPNLEWLTIAFLQEPKDGITGLENLLKLKEIEFFGDIILSMVTKVASCMKAHPNRPRVIGDKWNNVTEYA

SEQ ID NO: 54716 - protein, 372 aa, Oryza sativa
MDDPMLNAVKEEESHGDGGGLEVVAGEDGAAAVAAGVAPRPMEGLHDAGPPPFLTKTYDMVDDAGTDAAVSWSATSNSFVVWDPHAFATVLLPRFFKHNNFSSFVRQLNTYGFRKVDPDRWEFANENFLRGQRHLLKNIKRRKPPSHTASNQQSLGPYLEVGHFGYDAEIDRLKRDKQLLMAEVVKLRQEQQNTKANLKAMEDRLQGTEQRQQQMMAFLARVMKNPEFLKQLMSQNEMRKELQDAISKKRRRRIDQGPEVDDVGTSSSIEQESPALFDPQESVEFLIDGIPSDLENSAMDAGGLVEPQDFGVGASEQQQIGPQGELNDNFWEELLNEGLVGEENDNPVVEDDMNVLSEKMGYLNSNGPTAGE

SEQ ID NO: 54717 - protein, 359 aa, Oryza sativa
MMEVTQVRASSEMAGGREPFVLPKSPPAAAPAPPPPSSGGMQSVRMAYTADGTPIFAPVNSAPAPAPAATYPPAGGNGAAALDAGEPVVKKKRGRPRKYGPDGSMSLALVPVSTAAVAASGPFSPAAAAKSPDAVSSAPPPGAKKRGRPKGSTNKKHVPSFGIGDIGSAGAGFTPHVIFVKAGEDVSAKIMSFSQHGTRGVCVLSANGAISNVTLRQAATSGGTVTYEGRFEILSLSGSFLLSENGGHRSRTGGLSVSLAGPDGRVLGGGVAGLLTAASPVQIVVGSFNTEGKKGPKLQAPSDPMSAPLKMVPMSGTGPSSPPSRGTLSESSGGPGSPLNQGVTASNHGQPGLPSLSWK

SEQ ID NO: 54718 - protein, 384 aa, Oryza sativa
MQALINKITKSIVSPLPTKYSGAFRGLIKSMLRKSPEHRPSAAQLLKHPQLQPYVLQVQLKSSPTRNILPIHQSLTDKVKKMTFPSDVVDSARRRMARRNSLGNERTVTFSKPSPERNSVSSTRSIKEYTTTQSVKGLSVDSSEAGDEVTSKAIITKTSSILRTPKSLPAKTYTARNQLEPPKTSYNRTYRSELPSKTTPNKIARPARRASLPLSTYETPTKRSISILEQLDSPDVSVNAPRIDRIAEFPLASSEDPLLPIHNKLSPGHGSCSTPPFINRSITKDKCTIQVLRTDGDNGSDSSGRNATAASSRGSNDSRQQRFDTSSFQQRAEALEGLLEFSAQLLQQERYEELGILLKPFGPEKASPRETAIWLTKSFKETAS

SEQ ID NO: 54719 - protein, 221 aa, Oryza sativa
MDLLRNNYLCAHQIIRNLFLSEDGSVPEDIQHLLNLILHEFDKREIFHFHGSLVSLANVSLFFKSMYDHIRFVMPPDDLRAILTNLPYADVWESKVKTNRILKKPYDFNPDGRIVPADKPSQTCLNKRQREFLHALGLTPIRGQKSLTPDQIALIETLFFFDFLRNRTSHRMDPWRSLILGYNAVDSEYACHVRFPLVVPYLQLELYNRGQLQALQLGHLF

SEQ ID NO: 54720 - protein, 788 aa, Oryza sativa
MLARWLLVLLLLLPVSWCHQDRHGRRHYPRRWRSSGSRRELHEPLFPLENAPALPPPPPPPPAPFFPFLPDSAPPQLPPPVTTPAPAGGAGDGGTDAGAAATGDASSSSSSSASPHPTAPANISYMAMPIYHSAPLRSFLSSHRLLTVLLPVAAVLAAVLAAALVYLLTRRRRCSKGEPHAAHTKAVLLSPGNSTALYDGDHDQHGRGSTATAASSASSPELRPMPPLPRQFQQTRTSMPSTSQTIHEAGAEDKRAPPPQSVRPPPPPPPPPPPPPMPPRTDNASTQAAPAPPPPLPRAGNGSGWLPRRYTERAAPTVIRASAGAVHPEESPARASPEEKAADAAARPKLKPLHWDKVRPASSGRPTVWDQLKASSFRVNEEMIETLFVSNSTRRASKNGVKEANAACCNQENKVLDPKKSQNIAIMLRALDATKEEVCKALLDGQAESLGTELLETLLKMAPSREEEIKLKEFREDAVSKLGPAESFLKAVLAIPFAFKRVEAMLYIANFDSEVDYLKTSFKTLEAACEELRGSRLFHKILDAVLKTGNRMNTGTNRGNASAFKLDALLKLVDVKGADGKTTLLHFVIEEIVKSEGASILATGQTSNQGSAIADDFQCKKVGLRIVASLGGELGNVKKAAGMDSDTLASCVAKLSAGVSKISEALQLNQQLGSDDHCKRFRASIGEFLQKAEAEITAVQAQESLALSLVRETTEFFHGDSVKEEGHPLRIFMVVRDFLTVLDHVCKDVGRMNERTAIGSSLRLENAPVLARFNAVQPSSSEEESSSS

SEQ ID NO: 54721 - protein, 52 aa, Oryza sativa
MSMVGTRSLFASSSPPLMGSTHYLSAPWVSPGAGYFTMLAILWSQSLTKQSS

SEQ ID NO: 54722 - protein, 693 aa, Oryza sativa
MPPRRYKGRGRGRGRGRGRGKGRGRAADATPVEEVDVEGAKSEEEEEEEAAAGSGGDTEAEDAKEEGASESEGEAMDVEAKESADEKEEEEAEAEADGDEGEDKSDEMDAEAGAAEEEAKEEEELKDAEVEGEGAGSDSERGEAEEADGENEEEAAATDGEKEEEAAETDGEEEAEEEAAETAGENEDEGAESDPEGEASDAEENASEESPPSPPTRGRRRKRAATSDPPPEDDEEEGTPAQPRRRKRAATSDPPPEDDEEEGTPAPPRRRRRRKAGDRGDSPPPLPDHLRCRRSDGKKWRCQNRALPTVSFCEYHYSRANKGKKPPADGEVLAVALQRQKKNKRKGRRNVNASPASPPAATSDVTRDLPNGLMRISPGSSEPAASLPSPVTTKVGVDIPVPTQRCYRSKNAEPMPVGPVKVVPRAMGMSKAGQKTCHRCGMKKAARIVQCKNCDNRYFCNSCINKWYSGLSKKDIKTRCPVCRGSCGCKQCTLGQTKGAISKESSGDQDKLISIKICNHQLYKLLPVELNQEQLDELEIEAKIQETKISDVRVQVADEQSGSLDCNNCKLSVHRFLRSCPRCPFKLCLSCCQKIRDGNISAATPEDKFNQRLLQQESAHEDGSISCPSIELGGCGDSLLNLVYVPPSDQSEEVSSGDELDGPGNHSGVKDAVAESNGGPDRLSVGQQETVSS

SEQ ID NO: 54723 - protein, 220 aa, Oryza sativa
MSYVRDPAMTAELLKRNDVDAIEIHTTGKGTDMFNTLWSNLGESINNVKLIAVSLPDVGDSTVNLMNAIYTTMQSHLQGYNLWQLDGRPMSGDIGRGATRETVSFAVHLSSMSNRPPGFYQLAGGTNSYTIESLKKAGLFQSTTFPGAATSGVTDCQQAFIGGIAYGGYARKIVGRVLRKIPAQFGHARIEDHPDYLLEALQEALSLVGPVKGYPTLPSL

SEQ ID NO: 54724 - protein, 863 aa, Oryza sativa
MPGAACKKTNLISPRRSPRLKNIHVIYGEHSETNYPTLGPVKTEVIDLEEIASPSNPEFNDDSVGDEDFQNVSLKDLRAQCKAKNRRALKVDSERPDFKNQRQCGKRNLEDEVPKEEVDLDEPIIAFRQKRQKTSPTKSNRTMGKPISLNAVKLQDTTLRREETEPIKLPPLEVTSHDSMSTAEKMERSAADVKHSTIAAGNTEEIVGENILYAEMENTPLSTGAVISGRSPDIFCEIKTEDEDIYSDEQVGVSSPGKDSFQDSFAELHREPIEYDGCQQHSGVIPQPIELEDVSDDSCELANSIKAYCLDDIILQNKTNDSLSSLDITDEMSNCHKTSGNITNLDEDKSSVVNDYLVCSVNMSCEDHIDIDEYWYPRDLHGSTLESTKTIESSTDQCNAEVGSPSVVIQSDLCGSAESNFTSLAEVVQMKADGQFDSLVQHSVGTKDVLPIDVGHATIDCTFAFNKTLDSVKAANFTTQDGRLESIVYDALNNHAQRKSTETETPVGVSGAAIISSPFVSEGTDREPTGSKAPHGGQLLLPCVTEWLSKDTDQLKVTVDDDICKTNSDQGSREQFGLQPQLLQSCSDLDKVCVTSESSSPEEPQEMPAGSLDSTAASLDTDGQSEKLQPFIDEGALEEHAPKKLLSKRKIMSPTSQEKLCSALTGIDLCGVQRLKRKILLEDCGKTRRPNGRSSLSPTSKGILKGTESPSPQKTTCTCMKAASVILDAEKAVEFSQRQMHDIENIASKLMRSLNHMRSIVDGNLLSESHSLLPTFNTAEIRAASEDALEVERTTRKWLTIMNKDCNRFCKILRLAGKKAVSHSEVPRKRKKITFADETGGKLCHVKMFTDGQNSLLSECHSE

SEQ ID NO: 54725 - protein, 313 aa, Oryza sativa
MAPPLLDLPSHCLLPRLRRPTSGRLLLHLRLKPLSSSSYTTTTTTTTSSSTSSSRAPQVPPSLHGPSLRRGRRLPGETDGLLSFARIFDLAALRVPAAACAPLERRLRGHLLNWPRVRNVVRQPGDDGGLLFPVPHPSLATPSSLPTAVARREKLAREFNARGFVQFPNLAKMSRPPARKRKGKKDEGGGEAAATARDTKDKVYVVEVIGERKEEHGDEWMGLVGEEGFGRITWRGGPTRLLLLDENYANKRVDDLPEAVKVVLDHETNKDGSSSYELVQCQLTLFYNYWPMNEVTLPLQIPDTDQKFSLYRF

SEQ ID NO: 54726 - protein, 258 aa, Oryza sativa
MSRRSVNPSRRVADGGLPSVGGLLHPKSRSPPVLTIALVVLGVIILIAYFNSGSGVTVTSREAVSRSEGSCTPEVMQALPYLKKAYGNELHKVLHVGPDSCTVVSNLLKEGKVEAWGVEPYDLEDTDSSCKSLVRKGFVRMADIKFPLPYRQDSFNLVIVSDALDYLTPRYLNKTLPDLARISTDGLVIFAGNPGQQKAKVSELPKFGRPAKLRSSSWWSRYFIQTGLRENEGPLKKFEQAASKNKYKPDCQIFHLSS

SEQ ID NO: 54727 - protein, 123 aa, Oryza sativa
MLKICKILGMAALVEVHDEREMDRVLGIDGVQLIGINNRNLETFQVDISNTKNLLEGERGQTIAQKGIIVVGESGLFTPDHISFVQNAGVKAVLVGESLIKQEDPGKAIAGLFGKDISPVSAA

SEQ ID NO: 54728 - protein, 426 aa, Oryza sativa
MASTVSFSPANVQMLQGRSCHGHAAFGGCSAVPRTGPRMRSVAVRVSSEQEAAPAVRAPSGRTIEECEADAVAVRFPAPPPLVRPKAPEGTPQIRPLDLTKRPRRNRRSPALRAAFQETTISPANLVLPLFIHEGEDDAPIGAMPGCYRLGWRHGLLDEVYKSRDVGVNSFVLFPKVPDALKSQSGDEAYNDNGLVPRTIRLLKDKFPDIVVYTDVALDPYSSDGHDGIVREDGVIMNDETVYQLCKQAVSQARAGADVVSPSDMMDGRVGAIRAALDAEGFHDVSIMSYTAKYASSFYGPFREALDSNPRFGDKKTYQMNPANYREALLETAADEAEGADILLVKPGLPYLDVIRLLRDNSALPIAAYQVSGEYSMIKAGGALNMIDEEKVMMESLMCLRRAGADIILTYFARQAANVLCGMRSN

SEQ ID NO: 54729 - protein, 332 aa, Oryza sativa
MSQCPTHVALRLLALLFLLPAAWSATFTMTNNCGYTVWPGLLSGAGTAPLSTTGFALAHGASATVDAPASWSGRMWARTLCAEDATGKFTCATGDCGSGGIQCNGGGAAPPATLMEFTLDGSGGMDFFDVSLVDGYNLPMIIVPQGGGAAAPAGSGGGSGGKCMATGCLVDLNGACPADLRVMAASTGTGAAAPGGGPVACRSACEAFGSPQYCCSGAYGNPNTCRPSTYSQFFKNACPRAYSYAYDDSTSTFTCTAGTNYVITFCPSTTSGKYSGGENPQAAGVPSTNDTMVVLGAEQLSTASSAAAHAAPQLTLPLLPLVVVAALVAAMI

SEQ ID NO: 54730 - protein, 627 aa, Oryza sativa
MASPPHLPLLLLLLVVVCNAAGGDGARVNPFTAKAAFIRYWNRRVPNNRPHPAFFVAKLSPLQAADAASFAAALPRLLPPLCARAALLCPSASDTETAASLAVGGGGGGGPFKGYSNANFTNYGSGGVGGADGFSAYSPDLNVVGDSFRRYGRDSTRRVDTFASYEAEGNVVTANFTSYAGAATGGSGSFSAYAADTNVPDSTFTNYDAEANGRRREFTSYSQEANHGSNTFAGYGKNGNGLRETFTTYGNDSNVIASGFTNYGESGNGATDTFTAYGKEGNVPDNTFRSYGAGGNAGVDTFKGYRSESNVGDDSFASYAKGANGNAAEFQNYGGSFNPGTVTFKGYGEGSNPNHHIGFKEYAGSNNSFKGYAKSGVDFKEYHNTSSADAATTMSLEAVSSGHQHLKWSPEPGKFFRETELVSGNTMPMPDIKDKMPPRAFLPRDIAKKIPFKPNAVSEVFGVPLDTAMGKAVTSTVAECERAPSRGETKRCATSAEDIVDFAVEMLGNDIVVRSTASTAGSGGQIRLGNVTGVDGGKVTRSVSCHQSLFPYLVYYCHSVPKVRVYEADIMAADSDQKINHGVAICHLDTSDWSPTHGAFIALGGKPGEVEVCHWIFEGDMTWTVAD

SEQ ID NO: 54731 - protein, 135 aa, Oryza sativa
MASSALRRSLRRLLPSSPPPPSPASAAAAATFRRSFLSGGGDGVGESVEEFEKRMLSGLDDGLENRRGGSDWGWRGGFRNRGNSSSILAELCTGFDSLEDGLDEKLDEASRTFHVTEEYEDDDYDYRPDVTFRRG

SEQ ID NO: 54732 - protein, 76 aa, Oryza sativa
MNQLPTFLPALFDAFSNQSPDVRKTVVFCLVDIYIMLGKAFVPYLEGLNSTQLRLVTIYANRISQARSGAPIDANQ

SEQ ID NO: 54733 - protein, 367 aa, Oryza sativa
MSTSPAGTSAPGPRSSPPTAGPPASTTRAPCSTQCPQNHHRLGRHPQRLRRRRELRGGRRRVPGDAQGPRAPQQGGHPQRAGRVRGARGAGARAVGARPPGCRPRRDGQGRDGGHGAGGHVRQVREPRDGEAGVLGHGGEGRVRVHGHGLGPVGPRPLRGGHRAVRADAGGRGAAQRGDLHLRAERVREGGAGRAREGDPGEHVGGARHGGRRGALRQHGGRAGAGGDGGGGPGGGAEDADEARLVRAGGAAERVRGARGHGGRGGGGGDDGGAGAGRPQRGAGAAVEPVRGAGEVGGGGGRAEGDGGEEGGQGARVQHGGGGRRRQRVRRRRPVARGVDHRRRRAAGADARPPLTPVRLSASSVNF

SEQ ID NO: 54734 - protein, 292 aa, Oryza sativa
MNSKLSLEHRHMIPIVNQTPTLILGMDVSHGSPGRADVPSIAAVVGSRCWPLISRYRASVRTQSPKVEMIDSLFKPLDDGKDDGIIRELLLDFYKTSQQRKPKQIIIFRDGVSESQFSQVLNVELNQIIKAYQYMDQGPIPKFTVIIAQKNHHTKLFQENTPDNVPPGTVVDSGIVHPRQYDFYMYAHAGPIGTSRPTHYHVLLDEIGFLPDDVQKLVLSLSYVYQRSTTAISVVAPICYAHLAAAQMGQFMKFEEFAETSSGSGGVPSSSGAVVPELPRLHADVCSSMFFC

SEQ ID NO: 54735 - protein, 571 aa, Oryza sativa
MPLHVRIREKTSIASLLSSRRNWSGGGVDGGKKSGKREGAKTKGTRTTGRNKSEKREEHKEARGNAGQRRRWSDTNGQSDAKKNASQAVRRKRKGDHDSWNGDHSDTPYSKSKLTRNGPSTMTRGKASARKGDRFRSETLDEDDLHSRKRGNSMVSSVSRGGRSNSMVSGITREGKSQSVFSRNAEASSKGKKFDTPTRVSRQKEAATDANLDDHGAESKKSDDSGQIADEKPRPRRTRVLDKTGKKIRVANKDPVSDIEETLPPKKRKRMKLDPYDTSNKRLEDSTAKQDVCSPEKIPEKSPPEETETSINAKFRAIQPSSSIISYVEDNLLGRRRLNEIKNASYNVKLSAPLDNVPFSTSPERERIEENVFRNKLEFFAAAKISSSFPPPTLPEIAFAGVSNVGKSSLLNALTRQWGVVRTSDKPGLTQTINFFRLASKLCLVDLPGYGFAYAKDEVKDSWQELVKEYVSTRVGLERVCLLVHTKRGMKPLDYELVDLMKRSKTPYQIVLTKTDLVFPIDVARRAVEIQESLKKNKSVVRPVMMVSSKTGAGVRNLRGVLGKIARFIKP

SEQ ID NO: 54736 - protein, 285 aa, Oryza sativa; identical to SEQ ID NO: 46367

SEQ ID NO: 54737 - protein, 366 aa, Oryza sativa
MAAAAEEPEPKPEIETPPPAREPPTEPPAAAPAPAAAASDRPLQPWEQHAAVINLPRYDYRASGSLLLRSHSGFLITCPIKREKSATKEAISILENSIGHANSYSSEKSEPSDTEVSAKKRKICSETPDIENSGDAVTYEKGDASETTGSVEKDSVSPHSKTSKNVDDTSNLSLVKLSRSGLLFFSFPSGGLRVVQMLTQMFHSLHSGKLKSPQWCHRIFPIQETCVLSEAELHTTVSKLFLDFVKSKEDQDEPIKFAVGYNRRGIDETEMKGQKNGNEGSKQQTLMDRDQCFKVVAGAVKSVAENSIVDLRSPEVAVLVEMLPISGVSLGSSVAGVSVLPSELISTKPRLCVKALVPDAKAAKKK

SEQ ID NO: 54738 - protein, 468 aa, Oryza sativa
MALVAEAMGSLVPKLTELLKEEYKLQTGVREKINFLKSELEDMHAALRKVGSMHPDLLDEQVRIWASKVRELSYDMEDVIDAFLVRVDGSVPANPGCLERLVHMMCGLFTKIKVRHQISGVVQDINTKLEEVSKARERYIASDLQANLAATQLSTHDPRILLSNTDAAKLVGIDGTRNDIIKILSLEGDNLPLGKMIKVSIVGSGGMGKTTLSRAVYDSVKGKFQCSAFVPVGQNQDLKRVFMDVLNDLDKEKFDNIHSTKKDVRLLMNEVYDFLENKRYIIVIDDIWKFDAWDMIAKVLGDSSCGSRVIITTRISEIAEEVGHVYEIKHLSDVDSRRLLHRRILSGEDQCPVDDYDLEEVCDEILRKCEGVPLAIVTTSSLLESKPREDWSELYRSIALGAKDNRHVDNTMKIWSLSFYHLPYHLRTCLLYLSAFPEDYLIGKQTLIWRWIGEGFVCKEEGRDLYEV

SEQ ID NO: 54739 - protein, 641 aa, Oryza sativa
MLILLVGKKSSQSWNSFYLEMSAEMGQREYFEIKTKQRRKGLVIGRSVNNYEQVNTDDGKGKEPVLWKETKENIEMQRLGSPPRHGRPSRTKNDGRYGRKRRCRKILYGKGIACISGESGIGKTDLVLEYAYRFSQRYKMVLWVRGESRYIRQNYLALRTFLEVDLSVDSHLHEKGSDRCFEEQEEEAIAKIRQELMRDIPFLVIIDNLESEKDWWDKRVITDLLPHFGGETHFIITTRLPRVMNLEPMKLSYLSGAEAMSLMKGGVKDYPLVEIDALKAIEEKLGRLTLGLGIVGSILSELPITPSRLLDTLSRTLPIRDCSWNERDAISLKNHEILVRLLDVCLSIFDHADGPRSLATRMVQVCGWFAPSAVPIHMLALAAHKVPKKHRRGPRWRKWWRTLTCGLATSRMKRSEAEAAAMLMRFGIARCSTKPEYVQFHDLIRLYARKRGGTRMAQAVVQSIYLRGSIKHSSEHLWAACFMFFGFGSDPFLVEPRPSELIFFVKQIVVPLAINTFITYSRCNAALELLRLCTEALERAADSMLSHAGKWRETPLSCFRPTQSEAQYTYLWQELALLKASVLETRAKLMLRGGQYDTGDDLIRKAIFILTSICGEHHPNTVSARETLSKLTRLLTNVQLS

SEQ ID NO: 54740 - protein, 731 aa, Oryza sativa; identical to SEQ ID NO: 54298

SEQ ID NO: 54741 - protein, 306 aa, Oryza sativa
MGSGGGGCGRNGAVRQYIRSKVPRLRWTGELHCSFVQAIEFLGGQDKATPKLILQLMGVKGLTISHVKSHLQMYRCSRLGSHGTGRRSEMQPQLQRKHSCGADEQVPREFLCPPLKRTRMGTEATYKGMQGSQGISEMRTTGTQYCIDDYMQAMAMERRIKEEGLRWQRDAAAAAAADGGAAASNLQTVGCSVQESDPFKIIKPEVHHLGPVLKLQCSKVENSGFISSSTGTAARDQPEPPPLEKCSLSLSLGPDPKCMPAIASSPSESSCILSSSSRSFSDCSGNSGCLVAPGVNLELSMSICGS

SEQ ID NO: 54742 - protein, 218 aa, Oryza sativa
MAKSRPPKRILESYTIKGSDKVIKPGDCVLMRASDTSKPPYVARVEAIEAAGSRGTNVRVRVRWYYRPEESMGGRRPFHGAKEVFLSDHYDVQSADTIEGKCNVHSFRSYTKLDSVNAEDFFCRFEYKSATGSFVPDRIAVFCKCEMPYNPDDLMIQCEECSDWFHPSCIGMTIKDAKKLEHFFCQSCTAENGKMAEDSHEATAQSEEKQVESKRRRR

SEQ ID NO: 54743 - protein, 335 aa, Oryza sativa
MPPPSLLLLHPRTPLPHHHRSSFRTSSPRPSRMVCAAAEGFISAAPILLPDGPWKQVEGGVTAAKGFKAAGIYGGLRAKGEKPDLALVACDVDATVAGAFTTNVVAAAPVLYCKRVLNSSKTARAVLINAGQANAATGDAGYQDTVDSADAVAKLLNVSTNDILIQSTGVIGQRIKKEALVNSLHRLVGSLSSSIEGANSAAVAITTTDLVSKSIAVQTEIGGVPIKIGGMAKGSGMIHPNMATMLGVLTTDAQVSSDVWREMVRTSVSRSFNQITVDGDTSTNDCVIALASGLSGLSSILTHDSTEAQQFQACLDAVMQGLAKSIAWDGEGEHV

SEQ ID NO: 54744 - protein, 196 aa, Oryza sativa
MRLASRASLRRAAAMSAYYNARGSARPRRGYYSGRPTPPPHHHHDAGAELVSGDSHHSAVRASNDSLRRGGGRGPPPSLYGYAPPQPPPALYGAVPYNYGHPQQPGPPYGAVPYNYGPPPPQPQDPQYGYATPNPYVQGHPQPYWRGPTNAGFRPPYAGFRPGAPQQSPRLAEYRRRWRFTQHRPPRQAGNIFQSL

SEQ ID NO: 54745 - protein, 328 aa, Oryza sativa
MKRRPAMDSHNEQPPPPKSLKIYVKMMKTFTLNVNSTDTVDQIKSKLSAIEGIDKSKQEMFFAGMHLKNEDKLADYNIMTNSSVDLYVTDAIQISVRIPSVGKTTKLNMRKSNSIADIKAEIEQEEGILMNEQILMYAGQQLEDNQLLSQCDLRNDQTFHVLVCPNDKLHVFINVRGEKTIGLETKRWYTVADVKLMIENLEGLPACSQILTRMQSGVGVALTDGRMLQDQHVKNNDTLLLQQNVQFFVKSWEGKTLTMVLKTSDTGKQIKDRIAEKLRIKESLYYLCHKGRVLLTEDTLLDHEVESNSTVYIRLRNSAVVKPNAKKR

SEQ ID NO: 54746 - protein, 330 aa, Oryza sativa; identical to SEQ ID NO: 36577

SEQ ID NO: 54747 - protein, 73 aa, Oryza sativa
MQGRLLCWITHFLQEVCNTFPLRTFEAHCLKELEDVFSRSLVYDLALGEENNVIKEVIRLRCRLKQRDERGSS

SEQ ID NO: 54748 - protein, 505 aa, Oryza sativa
MYRAASGLGAIKRHGLDGQMLNVAIRCASTSVAQRSSGGFWTWLTGARSNALPPPDFTLPGVTIPPPLPDLVEPGKTKITTLANGVKIASETTPGPSCSVGVYVNCGSVHEAPETLGATQLLKKMAYTTITNRSHLRVVREIEAVGGNVKASANREMMSYSYAALKTYMPEMVEVLIDCVRNPAFLDWEVKEQIMKLKAELAEASSNPETFLLEALHSTGYSGALATPLIASESSVSRLNTNVLEYFLAENYTAPRIVLAATGVDHDELVSIAEPLLSDMPGVTGPAKPKSTYVGGEYRRTADSSNTDVALAFEVPGGWLKEKEFVTVSVLQTLLGGGGTYSWGRHGKGLHSSLNHLANEFDQIRSIAAFKDVHSNTGIFGIHTSTDAAFVPKAIDLATRELTSLATPGKVDQTQLDRAKATAKSAILMNLESKASATEDMGRQILAFGERKPVEHLLKAVDGVTLKDITALAEKIISSPLTMASHGNVLNVPTYDSVSGKFRSK

SEQ ID NO: 54749 - protein, 870 aa, Oryza sativa
MRSGAQAPRGGGGGGAFSKRTLSGYMRIMSSGASTAASSLLSVGASLVNSIASHDEDGSRDQVQWAGFDKLECGGDMLRQVLLLAYRSGFQVWDVEHANDVRQLESRHDGTVSFMQLLKKPIASTNSEDKFADERPLLALACDGTSTGSLISNDGNGPVPNGANGTLHNIGHENHPTVLRFYSLRVHDYVHTIKFRSTVYSIRCSSRVVAVSQANQIHCFDAATLEREYTILTSHIVPPISSYGPLALGPRWIAYSGNPVPVPDTGRVTPQLLNLSPLVPQPGSNGSVVAYYAKESSKQLASGIITLGDVGYKKLSKYCSDLIPSSNNVINQRNSGFKANGATINGHTDSEYAGMVIVRDIVSKSMVVQFRAHTSPISALCFDPSGTLLVTASIHGRNINVFRILPSSHGSSSEAGPNGTCVHLYKLQRGITNAVIKDISFSDDSEWIMISSSRGTSHFFAISPYCGSTSFHYNENNLAENSYAVDSSVNHTAHWSQNSAPSLSLNQKILSVTGPPVTLSVVSRIRNGGNLLKGAVHGAAAFATGVSSPISGAIASTFHNCKGAVKNSDGSSPCMKYHLLVFSPSGSIIQYVLHRSAEQDPGIDFPSSAIPYGSQRETDTRFIIEALQKWDVCHKRNRRDAAESFVYSDFDIGENSKLFQKVAKKGTSVYPSNGTAVEKQKLGDENHNFYISESELQTHVVPTPLWSRSGMHFQVMGDGALEADNTGIISGELEIEKLQTRNIESRSKNLIPVFESLHTSRFQQSRVSTPDSNKYGLLQRQKSGFSEDGRLSCRSSSSSLDCMSEGPISTDDNGFGQCLVEDSGGAVNKNPNVNPRSELVNNTQSLNTEAQLGFVNNKEDCEDREQLPDL

SEQ ID NO: 54750 - protein, 612 aa, Oryza sativa
MAPPLYLLLLLPLLACADEVPDRYAVLRAPQGPGASAAAKEYLDPTFPLPAPPPAAPSCTVPVLSYSFGDTYGAAPAKASYAPPAGCPAPWSLVVLTFSASCAGDQYDRVAAVWLDGAELLRTTTAEPTPEGVRWTVRKDVTRYSALLRSPPGGVLSVMLENVVNDKYTGVYSVNVSLEFHGTPPYLSDAASSSPAGVASNDPKEPMLPESYFQPADLIVPISDVAGNGKGGFWFRIQNASDSHSRLVTIPSSTYRAVLEVFVSPHSNDEYWYSNPPDIYIRENNLTTRRGNAAYREVVVSVDHRFVGSFVPFPVIYTGGINPLFWQPVAALGAFDLPTYDVELTPFLGLLVDSNAHEIGLSVFDGIAEWLVDANLHLWLDPSTSDVHAALGAYQTPRLKISRHYSTRLLEGRFKIKAKRKSSFSGWVKSSFGNFTTEVEAELKATSLVELTGDGRNKTVSLEAKQETKTLIRAGDTRKVIGRVEREAKYPLSLFAETEDGENGTSVVTVSLTHGLSVETEVETKALESKEKLDDAQAAQGWMVLLDHDVLNGSVTTTQAYRFSDDEREYERAIDVVDGAVLSDNVTESFSALAAAAADARRRRFHAGIAAL

SEQ ID NO: 54751 - protein, 450 aa, Oryza sativa; identical to SEQ ID NO: 48792

SEQ ID NO: 54752 - protein, 446 aa, Oryza sativa
MALLLLRMGVSVALLVAFFSSLIPSSEAYDPLDPNGNITIKWDVLQWTPDGYVAVVSLYNYQQYRHIQSPGWKLGWVWAKKEIIWAMNGGQATEQGDCSKFKSNIPHCCKKDPEIVDLLPGTPYNMQIANCCKGGVLNSWAQDPANAIASFQVSVGQAGTTNKTVRVPRNFTLKSPGPGYTCGSAKVVRPTKFFSQDGRRTTQAHMTWNVTCTYSQIVAQRSPTCCVSLSSFYNDTIVNCPTCSCGCQNNKPGSCVEGNSPYLASVVNTHNKDSLTPLVQCTSHMCPIRVHWHVKVNYKEYWRVKITVTNFNYRMNYSQWNLVTQHPSFDNLTTIFSFNYKSLNPYGVINDTAMLWGIKYYNDLLMTAGPDGNVQSELLFKKDPKSFTFEKGWAFPRRVYFNGDNCVMPPPDAYPWLPNASTRVMSSILLPFITIWTALTFLMVYA

SEQ ID NO: 54753 - protein, 845 aa, Oryza sativa
MRATPPPPPRPPARAYPGTSPMGSSPALPRSTNPAALLAHLAAVLTSPDWFLNPSLPRLPALLTPSLPESLPVPLPVRLAAAAARVAAPSRHLLAVALPVVLRLHSLSPPPLRPLFDRPFASLLAHLSRFALAPLALRLFAHMHRHAPPAPTAPTYNAVIRSLCRRADLARALRYLSLMVRSGWRPDAYTFNSLIVGYCRTNQVDVARDLFDKMPLRGFAQDVVSYATLIEGLCEAGRIDEAVELFGEMDQPDMHMYAALVKGLCNAERGEEGLLMLRRMKELGWRPSTRAYAAVVDFRCRERKAKEAEEMLQEMFEKGLAPCVVTCTAVINAYCKEGRMSDALRVLELMKLRGCKPNVWTYNALVQGFCNEGKVHKAMTLLNKMRACGVNPDAVTYNLLIRGQCIDGHIESAFRLLRLMEGDGLIADQYTYNALMNALCKDGRTDQACSLFDSLETRGIKPNAVTFNSLINGLCKSGKADIAWKFLEKMVSAGCTPDTYTYSSFIEHLCKMKGSQEGLSFIGEMLQKDVKPSTVNYTIVIHKLLKERNYGLVARTWGEMVSSGCNPDVVTYTTSMRAYCIEGRLNEAENVLMEMSKNGVTVDTMAYNTLMDGHASIGQTDHAVSILKQMTSVASVPNQFTYFILLRHLVRMRLVEDVLPLTPAGVWKAIELTDVFGLFDVMKKNEFLPNSGTYSSILEGFSEDGRTEEATSLVSLMKEDSISLNEDIYTALVTCFCKSKRYLDAWVLVCSMIQHGFIPQLMSYQHLLSGLICEGQTDKAKEIFMNSRWKDYSPDEIVWKVIIDGLIKKGHSDISREMIIMLERMNCRPSHQTYAMLTEELPDRE

SEQ ID NO: 54754 - protein, 417 aa, Oryza sativa
MFLIFWPIQYSKKSIWQSRRGKPGATSPGKPKQFLKNYKASLRFLDFLEGYCSSKPAVTKFRSEPAYADFMRQWHVAVYFTLKFQDIAGGLDSVLTATITPAGMHDNQAKPQTLLLKQSVKLLESLQACWSDDVLVFSHSDKFLRLSLQLISRYTTWLSSGLAARKASDGGSSSPADAEWALSVPVEDFIYVMHDVNAVISELLESGQFVEHVNQLLASCPTEVLALVKHSILQAVEPLKELLPAIMNVMIMVIVKRSNEDLKHLKGITATYRMTNKLPVRHSPYVSGILHPLKVFLEGDRIHYLSEDDKAKLRRGSTDKITSIYYDMVSEVVTVARKTESSLQRLRQGAQRRVGANTDTSDNIISDTDKICMQLFLDIQEYARNLRAIGIDAREIETFRALWQCVAPRDKQDNIQF

SEQ ID NO: 54755 - protein, 484 aa, Oryza sativa; identical to SEQ ID NO: 34801

SEQ ID NO: 54756 - protein, 65 aa, Oryza sativa
MQKLFGTTIQVDLVSSLKSNLTRVGRYLALLLELTCLRDLESAKSIVQSETTIAFTSSVLRHQRI

SEQ ID NO: 54757 - protein, 395 aa, Oryza sativa
MFAGGADGGNGHLPRPRRARRGGGGGGGMGSPPLGPPPPPCTDYDMAYFKAYSHIGVHEEMLKDHVGTNTYRNAIMHHQDLISGKVVLDVGCGTGVLSIFCAFAGAARVYAVDASDIALQAMEIVRENELSDKVIVLHGRIEDVEIEEKVDVIISEWMGYMLLYESMLGSVIFARDKWLKPGGLILPSHASLYLAPITNSHRYQDSVYFWQDVYGIKMSSMMPLAKQCAFMEPSVETISGENVLTWPSVVAQVDCYTIQAPELETITATFNYTSMLQAPLHGFAFWFDVEFNGPVRQRSKKQANQCLDGNTQDASPSNKKKKADAPIVLSTAPEDAPTHWQQTLLYLFEPIELKKDQNIEGSVTISQSQQHARFLNICLKYFTRDQWYVKESVMK

SEQ ID NO: 54758 - protein, 214 aa, Oryza sativa
MSGATKFIKCVTVGDGAVGKTCMLICYTSNKFPTDYIPTVFDNFSANVSVDGNIVNLGLWDTAGQEDYSRLRPLSYRGADIFVLAFSLISRASYENVLKKWMPELRRFAPNVPIVLVGTKLDLRDHRSYLADHPAASAIATAQGEELRKQIGAAAYIECSSKTQQNIKAVFDTAIKVVLQPPRRRGETTMARKKTRRSTGCSLKNLMCGSACVV

SEQ ID NO: 54759 - protein, 623 aa, Oryza sativa
MLRLVGIGERLLAVGTNRRAAYFSQPSHRSGYYTAARDNGLSAKRKIPTVFSRMFSHYKVIVRKNKAGDHKCRNRISRGFRTFSGTVANSSATQHAQLAWKRLSHTYMYSGPRFPLISRAACALSFSFTRFHVVPGVMALAFGKFALSRPVLADSPHLPTMEGIVTNARDTRQFLSSIVWSIWEGVTLLIRAVHLAILFFPATALSPFADTFSVGFRRRWLRLVRRTLEIAGPAFIKWGQWAATRPDLFPSDLCVELAKLHSAAPAHGFAYSKATIEKAFGRKLSEIFETFEEEPVASGSIAQVHRATLRDQHTEKHVAVKVRHPGVGESIKKDFLLINLLAKASNVVPGLSWLRLDESVRQFAVFMMSQVDLSREAAHLSRFIYNFRRWRHVSFPKPLYPLVHPSVLVETFENGESVSRFMDEIEGNARMKRDLAHIGTYAFLKMLLEDNFIHADMHPGNILVRLNERKPKRKLFFRPKPHIVFLDVGMTAELTRDDRDNLQQFFKAVATRDGRTAANCTLQLSKQQSCPNPVAFIEELDKTFSFWGTPEGDIFHPVECMHQLLDTVRRHKVNIDGNICTVMVTILVLEGWQRKLDPGFDIMHTLKTLLLDKDIKQPVDFFS

SEQ ID NO: 54760 - protein, 363 aa, Oryza sativa
MRSTAAAADVIDLSSDDDDEVPVPSTSAAAAAAARRVAPSTSPRDVTPYALVDVKPALLYPLQPPGVVVGGSGALVPVKEELPVLTPVPLLAAGYSPSTPSTKVALPAPRLCRQFWKSGDYVVAQRNPDADAPGGRNRLRINPRFLHSNATSHKWAFGAIAELLDNAIDEVNTGATFVRVNEFTNPRDGSSSLLIQDDGGGMDPEALRRCMSFGFSDKQSDALIGQYGNGFKTSTMRLGADVIVFTQNQNNWVPTRSIGLLSYTFLMETGCDDVLVPTVDYQYDISTASYTQMLRHDQKLFSSNLAILLKWSPFASEAELLKQFDDIGEHGTKIIVFNLWFNDDGDMELDFNSDKKVSNAGIF

SEQ ID NO: 54761 - protein, 385 aa, Oryza sativa
MSGLLNSNLNNSASNLQDSTGRPFTGSFSGQSGSVPGGFHHSGLHNMHGSLNMPNMPGSFSQRNAAMSGLPSSGVQQPGGSMPGRFASNNLPVGMSQIPHGHSGVGSKGLNVGGGPAFSSSLNIGGTIQGLSSNLGAGGSRNSVPGMSVSPSLGNLGPRVTGSVGNIVGGSNIGRNISSGGLSVPSIASRMNLSGNVGSGGLNVQGSSRMMNGILQQGSPQMLNMMGSLYPTSGGSLSQNQIQGGNNSLGSMGMLHDASDGAPFDMSDFPQLTGRPSSAGGPQGQYGSLRKQGVGVNTIVQQNQEFSIQNEDFPALPGYKGNTTDYAMELHHKEQLHDNVPVMQAQQYPMSRSVGFNLGSNYPPNRQQHSKVLIQFRMLVPQISD

SEQ ID NO: 54762 - protein, 441 aa, Oryza sativa
MDVEGEVPAAAAEAVANGLGGAEPSPAPVSAEQLDVEAYAAQYTGRTRLARLLFIAERCGVEAVELEALRMAYDEIKRGEDTMFHREVTNKINGRLGPKYALDQAWTDSVNRRAEQRKEKLESELNGYRTNLIKESIRMGYNDIGDFFYAHGHLSDAFKSYIRTRDYCTTSKHIVQMCMNVILVSIELGQFPHVSNYVSKAEQTPDTLDPIIVAKLRAAAGLAYLATKKYKLAARKFVETGHELGNNYSEVIAPQDVAVYGALCALASFDRSDLKSKVIDNSNFRNFLELVPEVRELVNDFYSSRYGSCLEHLEKLKTNLLLDIHLHDHVETLYMDIRHKAIIQYTLPFISVDLNTMAAAFMTSVSMLEKELAALITENKIQARIDSHNKILYARHADQRNATFQRVLQTGNEFERDVKSLLLRANLIKHDFNQRAGQRKM

SEQ ID NO: 54763 - protein, 974 aa, Oryza sativa
MEQVRRKSSLRSHGSGKSSPRVGSGVFDERSGLAADRDGGEEGEVVVRIDGEGPCREPFAFPGQDGGGAGNVSPNTDSTASTPRGASRTWSSWTNSPRSPPKVRRDGSVEFWKNDGGGDGGSDGGGGRGGGGGGGGGRRACEAFSFKNRAPPRPSSSQASSPSLSPQPAHAAGAVDGGEDPPTRLIGNFLRKQKASGAELSLDLDMEELGRPSQLHAQPSFSNSLEREARVSFQPKRRVASSSDSDSDTGGSRRRGGDDGEVVRCTSSSTAAGHLMRAKTRSRLMDPPPQPQPASAVPPVGDEERRSSVLRTPTKSGQFISGLMTGKSGQIAKSGPLEEEEEDPFMDEDIPDEFKRGKLDAITILQWLSLVLIIAALACSLTIKALSGKKVWGLHLWKWELLVFVLICGRLVSGWVIRIAVFCVERNFLLRKRVLYFVYGVRSAVQNALWLGLVLSSWHFMFDKNVQRETNSPVLPYVQKILFCFLVATLIRLVKTLLLKVLASSFHVNTYFDRIQEALFNQFVIETLSGPPLVDENQFLAEMHELQRAGATIPAELRSTVPTKNLSGQRSIRMSGVIPKGEGSKQLSKEKGEHQIEEGITIDKLHKLNQKNISAWNMKRLMRIVRFGTLTTMDEQIQQATGEGDESATQIRSEYEAKIAAKKIFHNVAKPGSKYIYLSDLLRFMRQEEAIKTMDLFEGAQEHSRVSKRSLKNWVVNAFRERKALALTLNDTKTAVNKLNQMVNVVVGIIVFALWLLILGIATTHFFVFLSSQVLVAVFVFGNTLKTIFEAIVFLFVMHPYDVGDRCEIEDCQVVVEEMNIMTTVFLRYDNLKIYYPNSVLATKPIMNYYRSPDMGEGIDFSVHVATPVEKLALMKERLLRYIDNKKDHWYPGAMIVLRDVDDTNKLKVSIWLRHTLNWQDMGMRFVRRELVLQEMIKVLKDLDIEYRMLPLDVNVRNAPPIQSTRMPTTWNYS

SEQ ID NO: 54764 - protein, 284 aa, Oryza sativa
MGRPYAVKGRKKKRKLDDGGASREPPVDEEAAEELPPPEGVEEEEGKEEDVAAAAAAGEVADGLPVVPRPVDGKRRPGAIFVLERACLEVGKVGKTMQILNSDDHANYLRKQNRNPADYRPDIIHQALLAIFDSPLTKAGRLQAVYVRTEKGVLFEIKPYVRMPRTFKRFCGLMSQLLQKLSITAVGKREKLLNVIKNPVTRYLPVGAKKIGLSYSAEKSVNLFDYVAKSSDDVPLVFVVGAMAHGKIDNEYSDDYIQICNYPLSAACCLNRICSALEQKWNIQ

SEQ ID NO: 54765 - protein, 714 aa, Oryza sativa
MTPTVLMEFGQQRQIKRGYDEMAFRGMASAAPRGYAETVGESEGAAGSPVRVDSEDSSAPKRKCISLNSDGFDVKREIFVPAKMSSSERRHLRKRFRTELDSVRNLLKKPEFAVPVPVNRAPALSSSAAPRGKKGQRGNHVVRGAKGRFLPTKPRPEASTVLTEDAIFKQCDAILKKLMTQKCSNIFDSPVDAVKLNIPDYFQIIKKPMDLGTIRNKLDSGSYTSPSEFAADVRLTFSNAMTYNPRGHVVHDYAIQLNKMFESRWRTIEKKLASIATEAHVEVDRADSKRRKTPPVDCSEVSTECVRPTESVRPTESVKPKMTFEEKESFGNCLASLSEDPEVPSHIIDLLQQCIDNNTDQLGDGEIEIDIHAVSDDLLFELKKHVDKYLQEREQSQQAKSEPSENEAANVSGLSHSSTNPCKGGDPVEEDVDICGNASPILIEKDAHNNPNKCGSPSSSSSDSGSSSSDSESGSDSESEQEKGGSPGKPKGSKRSEQLVEQEKSDVISPVDAIRPADDVELREQDNESKPAPEGENSKPDRQVSPDKLLRAALLRSRYADVIVKAQGILSQGGDKQEELEKLQKEEKARLLAEGNAAMEARRAEAEAEAKRKRDLEREKARQALQEMEGTVEINDNLHLKDLEMLGTATTEHIVSSVDETSPEHSQDGMPSFLPGSGNPLEQLGLFMKADEEEEEEDPSSVPSTKDAEEGEIN

SEQ ID NO: 54766 - protein, 728 aa, Oryza sativa
MRLAGGFVFLLCVHLFLIPPDGALSAPGGGGERCRRQCGGLVVPYPLGFSGSCPILLACVDAGNSTAALILPGGGGGGNATTTTSSYSYTASNFNASRSTFVVALPPSCSRTVSEARRWLSGANYGVSSRTGLFLRGDCHRNSSASNATNCSIPAETMSRMVPTASCGAEGNTTASALTCVTSTSPAPDPAKPESSSGSGIVGLFAEWKKLEEPSCDNLLTSVYGDTREGVFSLEFSVAEMGWWVNGNCTHGGGGGDLAWRCAPNATCLNVQTPTGGWGHQCKCLHGMVGDGFAAGEGCYFAAKKSSTKKILIIVGGVLAGTVAAGVLFLCCARCRRSGGGGGRSGFDRLAAKRLLSEAASSSGVPVYSYHEVARATNSFSHTHRLGTGAYGTVYVGKLPASSPSLVAIKRMRRRHDDGDDDAAVAVLLNEVKLISSLSHPGLVRLLGCCLDRGEQILVYEFVPNGTLAHHLAGGGLPWRARLGVAAETAAAIAYLHAKRPPILHRDVKSSNILLDGDLRPRLADFGLSRAVGRLDQASLSHVSTAPQGTPGCLDPEYHQNFHLSDKSDVYSFGVVLLELITAMKVVDFARPAAEVNLASLALDRIGKGRVDDIVDPALVDRADEWVMRSVRHVSELAFRCLAFQKDVRPAMSEVAAELARIRDAAPASVPGARTGAGSRPPMVIDVGVGFDGVDAAVKKVGSPVSVQDVWVSDQSSPSTNGSMPRFA

SEQ ID NO: 54767 - protein, 366 aa, Oryza sativa
MSSDIRKWFMKAQDKNGGAAKPAGTTALAKKPVLSIPEKPSAAPSMAACDQDCSARRKTSKYFASKTEKEEDTSAGKGTGRGLPKRKLQEVSDELEDDMKPLPAKEVHKEEEDDDDDDFVAPSKRKTPVKPPPSKKLKGASTAEAHGKTGLDDDNEDKMDEDAKTPSKASGSGRGRGRGRGRGGRGAGAAHGKTIGLDDDGEEDKMDEDAKTPSKAAGRGRGGASGGRGRGGGGRGFMNFGERKDPPHKGEKEVPEGAPDCLTGLTFVISGTLDSLEREEATDLIKRYGGRVTGSISKKTNYLLADEDVGGVKSNKAKELGVPFLTEDGLFDMIRKSKPAKAYCGKTSKRQKFRKAAKITNEEFSS

SEQ ID NO: 54768 - protein, 173 aa, Oryza sativa
MLEGGNFSNQETLYEVLSVRKDATYDEIRAAYKSAVLNTHPDKAQMALNPLVSSSERNEFLSVQKAWEILRYPKSRAEYDKQLQSSRQNLEIVATEIEIDDMIVESTADSVELLYPCRCGDYFSITSRELGQIGISVREDGEMELHTSDSVPSSVVLGCGSCSLKARLVTNKT

SEQ ID NO: 54769 - protein, 191 aa, Oryza sativa
MAAATNAAAAAAAAPAPAPATPVPRGQVDLVDFIDWSGVECLNQDPAHSIVNALKQGYRDDEGLYLASDSDEQLLIHIPFMQVVKLHSALFKGPEEDGPKTIKLFCNKEHMGFSNVNDYPPSDSLDLSSNHLSESKPMQLKYVKFQNVRSLTIFIEDNQSGSDVSKILKIALYGTTVDTTNMKDLKKIEEH

SEQ ID NO: 54770 - protein, 432 aa, Oryza sativa; identical to SEQ ID NO: 37640

SEQ ID NO: 54771 - protein, 550 aa, Oryza sativa
MSGQLSAFGYAITEEPEGADLWLINTCTVKNPSQSAMTTLISKCKSANKPLVVAGCVPQGSRDLKELEGISVIGVQQIDRVVEVVEETLKGHEVRLLSRKTLPSLDLPKVRKNKFIEILPINVGCLGACTYCKTKHARGHLGSYTIESLVDRVKIVVSEGVREIWLSSEDTGAYGRDIGTNLPNLLNGIAAELPADRSTMLRIGMTNPPFILEHLKEIASVLCHPCVYSFLHVPVQSGSDAVLTAMNREYTVSEFRRVVDTLCELVPGMQIATDIICGFPGETDEDFSQTVNLVKQYLFPQVHISQFYPRPGTPAARMKKVPSVEVKKRSRELTSVFESFSPYQGMEGKVERIWITEIATDGVHLVGHTKGYIQVLVIAPDSMLGTSADVKITSVGRWSVFGEVIEGSVVAKETQKHNHSELQEEYRPSQVEEATCCGTDSCGACTCSDAAQRCNPGPERSENSTPQSCGDATHQEAVQSKLVRRNVEGAVKSSESDTAKQVGEIQRLNVAARRFPDVDTILWGGLAVSFATTVTLIALLAYKISSTPSY

SEQ ID NO: 54772 - protein, 100 aa, Oryza sativa; identical to SEQ ID NO: 31913

SEQ ID NO: 54773 - protein, 134 aa, Oryza sativa
MQSSYLHSTSGHSRSDIAVNVMEASVVSCDNKGEECAMMEDSNVDVEDETMSTSFLMLLTLRSIKSLIIAGLLIFASSTSISPVSMRTTIDIVGRCFVTSCVHKSPIFRNIQACATSKSSPKEASMIFSKSPSS

SEQ ID NO: 54774 - protein, 417 aa, Oryza sativa
MIVLQELPSSFVEHLGFRRFCASLNPYFRVVSRTTIKGDCLAAYQEQKLALLEVLRKTNSRVSLTADMWSSNQNLGYMCITCHFIDNEWNMQKRIIRFTQVRTPHDSIALFNEIIKCIQDWQIESKLFSITVDNASTNDSMVVELKGNLLGKLAMPCKGELFHFWCAAHIFNPIVQDGLSTISAAISRIRESVKYVRASEAREQKFEEIIAQVGIVEEKRPSLDVSTRWNSTYLMLSSSLLFRRAFDSLDRFDPNFKDAPQFFDWENAEVLCKHLKVFYDATVVVSGTSYPTVTRYFHEFWKVKVMILNESNNEDDLVASLVSKMDTKFQKYWDLQFLQIWVPVIFDPRFKLKFLEFRLKAGFGDKATGPNGYLPRIKRTVRTWFAEYSSQICGPSTTNSQEASTSGVNVGGSQFAD

SEQ ID NO: 54775 - protein, 375 aa, Oryza sativa
MQRSSSTLAVMVVSFVVLLAGGAGAAAAAVAQPVPLFVFGDGTLDVGNNNNLPGDEDVGDPPRANHPYYGIDFPGGKATGRFSNGYTMADFIAKYMGYEMSPPAYLSLSGPVNMDGFTGVNYASADAGIRNSTNAGLTIPLSKQISYFATTRSQMESKLGRLAMSDLLSRSLFLLAVGTMDLLPDCNYFLTFPPSPPDNKTEVQRLVELYNASVTSLYGMGARRFAVVNVGLVGCGPTVDTRRGGGSGGGGGCDARMNGLAAEFNAALGALLAGLRSEKRRLRYSLADFYAFSNATFANPSAAGFVNIDSSCCPGPCMPFPYFNQPPCDNRAQYWFWDGGYTTEQAAMVAAAAFYNGTAKFTTPVNFKQLIRRKK

SEQ ID NO: 54776 - protein, 234 aa, Oryza sativa
MSSSAARVGGGGGRDPSNNPAVGRLRELVQRGDAAYGWEKSWEAAVTPWDLGKPTPIIEHLVKSGTLPKGRALVPGCGTGYDVVALASPERFVVGLDISSTAVEKAKQWSSSLPNADCFTFLADDFFKWKPSEQFDLIFDYTFFCALDPSLRLAWAETVSGLLKPHGELITLIYLISDQEGGPPFNNTVTDYQKVLEPLGFKAILMEDNELAIKPRKGQEKLGRWKRFVPGSSL

SEQ ID NO: 54777 - protein, 336 aa, Oryza sativa
MRWLPRLLSHAAAAGRATARTTGSHARGSNGFASGRGGSDGAVVPREWLRKLWTEELRRQRDAARRWGRRAVATTDGGGADSFSDFARAPSRSYQHDDRDLTPVEAKLKPLLSRANLLIARDIEWANIVLAFEQESRYIIMDPLFPQSPVGFIREKSNVIFRQLFRSRRPFVAEITDAMGNEIFTVRRPFWLINSSIYAEVNGKEVGVVHRRWHLWRRIYDLYLGNRQFAVVENPGFWNWTFTLTDEDDNVLAQIDRNWRGIGFELFTDAGQYAIRFGDAGLNRKFGLASDIDELHVVRQLSLPERAVALALAVSLDCDYFSKRGGWGLPFLIATE

SEQ ID NO: 54778 - protein, 597 aa, Oryza sativa
MGGANDSSPSSKLHTRLRLWEFPDRYVFEPIDGLADLYLSANRSDGSMNLVEELPPRDSSTKPKCQTVYGVIGVLKLSVGSYFLVITGRDCVGSYLGHAIFKVTGLKVLPCSNSRSTSGNQSKMETEFSELLHAAEKTIGLYFSYDINLTLTLQRLHNLGDEFKSLPLCRQAEPRFLWNSYLLEPLIENKLDQYLLPVIQGSFQNIHAEVGSEKVNVTLIARRCTRRIGTRMWRRGADPEGYAANFVESEQIMESKGFTASYVQVRGSIPFLWVQIVDLTYKPSFDIVRQEEAPRILEQHFHDLQKKYGAVLAVDLVNTHGGEGRLHDRYAKSIEPILSEDIRYVHFDFHRICGHIHFERLSQLYNQIEDYLKKHRYFLLNGKGEKIEEQTGTIRTNCVDCLDRTNVTQSMIGGKILENQLQRIGVLGVNDTISNHPAFDAKYKVLWANHGDSISTQYSGTPALKGDFVRYGKRSTQGILNDLWNSLARYYLNNFADGTKQDAMDLLQGHYIISVSRDMAGPSKAGLLENYASFRLAFALVMGALMFMMMSLRQARNDVRHLVLSLLWAGLCIGITHFVRANGRVFTNRPRFYQSRH

SEQ ID NO: 54779 - protein, 305 aa, Oryza sativa
MSLLSNSLLLQGRLRHAAASAVAAAAMGRRGVATSTEEYNRRNYANNISEYNTVFGSLTAQRRHYLLRDAYDDMMLDGVQPVRDTFHNLIVGAMKGSRLQDAFYFRDQMKEMGLQPDVNLYNFLISTCGKSKNSDAAIMLLEEMKAHGVKLKGETYTCLLNALAATGRTDQVYAIVRDMTAAGLGLNKFCYAGLITAFKNKAPTTEETMTKIVEFVQQSKGWKNVERVSKDSSENIMMNVSEEELYNLPTAEYVHRQAFVYKQMTIYHVAIHACADLKSKETLEVLLDMLIKDGFTYDAFIAIQL

SEQ ID NO: 54780 - protein, 624 aa, Oryza sativa
MAFGGLQDFLTEKKDLTNTIIRNRILPLYSLDPCSPYLISAANWIIGQLALCLPEAMSTNIYHSLMKALTMEDFDELSCYPVRASASGAITELIENGYAPPDWLVLLQVVMKRISVEDENESTLLFQLLGTIIESGQEKVMPHIPEIVSNIANTIMKLLPPVPDPWPQAVERGFAALVSMAQAWESSAPDENKDIEMRVWQSGQFAMAQTFSHVLQKAWLLPVEQMGLSVCSSLPPLSCVNDASILLEFIMRSITSMEETASMKVFELVAIWADIIACWDSWEEMEDQGIFNTIKEAVNFHQNFDSNGFFLKILPSRSENSSQSSVISWVSSFITRAIEAYPSATWRACSCMHTLLHTPNFSHGAEDTRMTLAVSFAQAAFSRFKSVSDSPSGIWKPLILVISSCYICYPDAIEQVLRKYDSNGYAIWASALAQISSSSFNPGLSSESEIKLAVLTLATVIEHLLALSMGGTKLLHDCCVSLMESCIHLKEVQEDGDDGDGAEDLDDDDDDEEEEDTDEDDEDYNQDSDDDDVREETEEEFLQRYAAAAGGESIEIVEDGDIDDETQDIELGSLDEMDVQQVVLSMMKIRPDLIRAQTFPDGLMERMAETFPEYEQLFHVHRQA

SEQ ID NO: 54781 - protein, 514 aa, Oryza sativa
MASISAASPVAGKAAAFAHKNELAAAAVAPSQQQLQRRVSGRRARSGRVRAVATPARAPRAPSSTGSVKSAMTMTEKILARASERASLEPGENVWVDVDVLMTHDVCGPGTIGIFKREFGEDAKVWDREKVVIIPDHYIFTSDERANRNVDILRDFCMEQNIKYFYDIKDLSNFKANPDYKGVCHVALAQEGHCRPGEVLLGTDSHTCNAGAFGQFATGIGNTDAGFVMGTGKALLKVPPTIRFVLDGEMPPYLLAKDLILQIIGEISVSGATYKSMEFVGSTVESLNMEERMTLCNMVIEAGGKNGVVPADQTTFNYLEGKTSVEYEPVYSDAQARFVSDYRFDVSKLEPVIAKPHSPDNRALARECKDVKIDRVYIGSCTGGKTEDFFAAAKVFLASGKKVKVPTFLVPATQKVWMDIYSIPVPGAGGKTCSQIFEEAGCDTPASPSCGACLGGPRDTYARMNEPMVCVSTTNRNFPGRMGHKEGQIYLASPFTAAASALTGYVTDPRDFLM

SEQ ID NO: 54782 - protein, 186 aa, Oryza sativa
MERRGLLKAALLVCLIVLCSGREIQVIQRHPSTTIYNPKLAKTLVEYASAIYTADLTQLFTWTCARCGDLIEGFEMMDIIVDVENCLQAYVGFASDINAIVVVFRGTQENSIQNWIEDLLWKQLDLDYPGMPEAMVHRGFYSAYHNTTMRDGVVSGIQKTRKVVWRCSDHGNRAFNGWSYGFVLCT

SEQ ID NO: 54783 - protein, 123 aa, Oryza sativa
MGRDGGGGSAGHRRCHRSLVVDGGNSGLDSDGGRGSGGRRCDDEAWRGGDASRHWLRPLDRLGFCGWSWRRQRTSYHVPSRPPPSIYMAQGDGGPPANGLGAPDQDAGQGPLVPLGSRGGRSI

SEQ ID NO: 54784 - protein, 303 aa, Oryza sativa
MDLWERARAFAGEAAKRSQELSAEAAKRSSALVSETAKKSKEIFSETATKSREIAAEATKQADLLAGQIKRLSTDLPVPSIPAIPPIPTAVTPEPDAAELERYGITEDLREFVKGMTISTFRDFPLQDEPEMSDVPTVSNVRQDLNEWQARHATLVLSAVKEISKFRYELCPRYMKERKFWRVYFLLVNNYTSLYENKYFEELKVKAEEEKMDAKKEVTETSQATTAEHKDMKVQSKTSTSTNPEHDLDVFLLGDLGSDDEGPDGDDDGLDDDFDKIDGTSGLESDDDDDKEKAAGKAESAKE

SEQ ID NO: 54785 - protein, 559 aa, Oryza sativa
MAEDAAAAAMAAASLSDDLEPATDRTRIRSILADGAARAGERVVVGGWVKTGREQGKGTFAFLELNDGSCASNLQVLVDAAVHPLAPLTATGTSVLVEGELKKPPEGAKQRVELRVDRVIEVGEVDPAAYPLPKTKLTLENLRGVVHLRSRTNTIGAVARIRHQLACATHRFFDENGFLYVHTPIITTSDCEGAGEMFQVTTLFSHAEKVEKELKENPAPSESDIEAARVVVKEKGDAVAQLKAAKASKQEITAAVAELNKAKENVSRLEERSKLKPGIPYRDDGTVAYENDFFKRQAFLTVSGQLQVETYACALSSVYTFGPTFRAENSHTSRHLAEFWMVEPEIAFANLQDDMNCAERYVQYLCKWLLEHCREDMEFMVKNYDKTAIERLELVSSTPFQRISYTKAVELLKNVTDKKFENKVEWGIDLASEHERYLTEVIFKKPVIVYNYPKEIKAFYMRLNDDQKTVAAMDVLVPKVGELVGGSQREERLDLLKTRIQDAGLPLEPYEWYLDLRRFGSVKHSGFGLGFERMILFATGLENIRDVIPFPRYPGRADL

SEQ ID NO: 54786 - protein, 173 aa, Oryza sativa
MPRVPLPLLLLVALLVAGGGGAAAETKPTAYEALATFDFPPGILPKGVVSYTLDDATGDFTATLNTTSTCAFSIQGSYSLRYQRRLSGRIAADRLTNLQGVSVKILFLWVNIVEVTRHGDELGFSVGIASADFGIDNFLESPQCGCGFDCHDHRDLSLPLPLPEPSLRLRGAF

SEQ ID NO: 54787 - protein, 401 aa, Oryza sativa
MAPNAAVLVRPHIAGVHHLPTGRRLPRLAPPQAVSPPFSRQKGSVVAASGRVWASASGSFEKDRIGDDDVLASPQIVEESKVDLLKILKSANTIIPHVVLGSTILALVYPPSFTWFTTRYYAPALGFLMFAVGVNSSVKDFIEAIQRPDAIAAGYVGQFIIKPFLGFLFGTLAVTIFNLPTALGAGIMLVSCVSGAQLSNYATFLTDPHMAPLSIVMTSLSTATAVFVTPTLSYFLIGKKLPVDVKGMMSSIVQIVVAPIAAGLLLNRYLPRLCSAIQPFLPPLSVFVTALCVGSPLAINIKAVLSPFGLATVLLLFAFHTSSFIAGYHLAGTWFRESADVKALQRTVSFETGMQSSLLALALANRFFPDPLVGVPPAISVVLMSLMGFALVMVWSKRTKE

SEQ ID NO: 54788 - protein, 332 aa, Oryza sativa; identical to SEQ ID NO: 32733

SEQ ID NO: 54789 - protein, 361 aa, Oryza sativa
MAAAGGLEQWQKDGFFQAAEEVQESADLMESIYRTWMRERDSGANLEELSDLQRELKTALGTAKWQLEQFERAISMSNDKYSLEEGTLARRRQFVVAMEDQISQVEKQINDYSIDNDRRGLNWVKLDDEERDDLVAFLSAPAQLSQDTKKRDNTYHSPSKQKNALIGANDPRDMAAISKDRHKTEALCREISNGQSEACCLAEQLNGHSTSPSSGGEHWKIDISDDKDDDRKLSPNKVEASSQATAFSGIMKTTESFTRVRWLRNSLWKAKSDEHLPLRYDMPNHLDWRVITLLAQRFNGLTKRSRSCFSGWKENSRVSGRMGGLHIQGPQYNTQFGRSIRITLLLVLSIFLIVPFLVYSA

SEQ ID NO: 54790 - protein, 175 aa, Oryza sativa
MDENENFFMGGFCYSSQYLLSKSATIMTLCVDYCSAVDTIAKSKSLSRRQKSRESKQYTARIHVADICQAILASMSIRSARRIYNVVDDDPAPRSEVFAFARSLVERKHPGLIMDSVVLPATQDRIVAAEKRVSNARLKEELGVKLLHPTYKSGLQSILDSWSVESSFSNRNVDV

SEQ ID NO: 54791 - protein, 440 aa, Oryza sativa
MKVEVVETTLVAPSEATPQHALWLSNLDLAVPKTHTPLVYYYPAPSPPPADAGAEAEAEGFFAPERLREALARALVPFYPLAGRLAAGPGGRLEIDCNGEGALFVVARADFTGDEMFTDFEPSPEARRLLVPFAASGEPPCVLAMVQVTFLKCGGVAVGTGMHHVTMDGAGAFQFIRTWTGLSRGLDAAAASPSPPSHDRTLLRARSPPHVPFEHPVYSPSYLNGLPRPFVTRVYSVPPKLLADIKAACAPGVSTYGAVTAHLWRAMCVARGLPHDAESRLRVPANIRQRVRPPLPSPYFGNAIVRDLVTVPVRDILSQPLGFVAERIKHAVARVDDAFVRSVIDFLELESEKGNQAARGQFMPETDLWVVSWLGMPIYDADFGWGRPAFVAPAQMFGSGTAYVTQAPDKDDGSGGGVSVLFALEPEYIQCFEKAFYGTE

SEQ ID NO: 54792 - protein, 11 aa, Oryza sativa
MCMISSLLLDS

SEQ ID NO: 54793 - protein, 517 aa, Oryza sativa
MLLPCHVLLGLLLLSLHTPASSAAATDTVSPGHSLAGSDRLVSNNSKFALGFFKPGNESSYTNHNSYLGIWFNKVSKLTPLWTANGENPVVDPTSPELAISGDGNLAILDHATKSIIWSTRANITTNDTIAVLLNNGNLVLRSSSNSSNIFWQSFDYPTDTLFAGAKIGWDKVTGMNRRLVSRKSSVDQAPGIFSLELGLNGEGHLLWNSTVAYWSSGDWNGRYFGLAPEMIGDVMPNFTFVHNDKEAYFTYTLYDDTAIVHAGLDVFGIGFVGMWLEGNQEWFKNYRQPVVHCDVYAVCGPFTICDDNKDLFCDCMKGFSVRSPKDWELDDQTGGCIRNTPLSCGSSKDRTSLTDKFYPMQSIRLPHNAENVQAATSGDECSQVCLSNCSCTAYSYGKDGCSIWHDELYNVKQLSDASSDRNGGVLYIRLAAKELPGSEKKKNRNISGFAIGASTATLFLMILLLILWRRKGKWFTRTLQKPEGGIGVVAFRYINLQRATKAFFREVGGRKFWFCI

SEQ ID NO: 54794 - protein, 259 aa, Oryza sativa; identical to SEQ ID NO: 49649

SEQ ID NO: 54795 - protein, 484 aa, Oryza sativa
MATSAAARFLAALAGAAVLLVLLGGAAGAVVGHDDDAAAARRTMEEFAGFPASDYRGDGGGGSGGSSPFYVDSDGLQRQIDELASFSDSPVPSVTRVLYSDKDVQARRYIKGIMNQLGLSIREDAVGNIFGRWEGSEAGLGAVATGSHVDAIPFSGKYDGVVGVLGALEAIRMLKRSGFQPKRSLEVIMFTSEEPTRFGISCLGSRLMAGSEELARSLKETVDNQNVSFFDAADSAGYKMHPEELHNVFLKKDDYFAFVELHIEQGPILEKEGIKIGVVTAIAAPASIKVEFEGNGGHAGAVLMPARNDAGLAAAELALAVEKHVLESGSIDTVGTVGILQLHPGAINSIPSKSHVEIDVRDIDEKRRNNVIEKVHKSAIEISKNRGVLLSEFKIINQDPPALSDKSVISAMEFAAKQLNLEYKLMISRAYHDSLFMARISPMGMIFIPCYKGYSHKPEEYASPEDMANGVKVLALAMARLSLQ

SEQ ID NO: 54796 - protein, 248 aa, Oryza sativa
MASARDLAVASISAAVGAAAAAAALRFFSSYGASSAKQRSPPTPCAEHLAVNGCAAERPPVQSPFDPAKREGYISWDDYFMAIAFLSAKRSKDPNRQVGACLVSQEGIILGIMYNGFPRGCSDNKLPWAKKSAKGDPLETKYPYVVHAEVNAILNTNHASAAGQKLYVTMFPCNECAKIIIQSGVSEVIYFVEKRIDNSDYVYVASHKLLSMAGVKVRKHQPQMSQIPIKFQEPRNGEPSMNAASIFS

SEQ ID NO: 54797 - protein, 193 aa, Oryza sativa
METIQALELGVEQKKSEPEVDEMPGSMEDQKPAEISQDKVAETDIKPAVQTELETSPVANPNPAETNQYTDGVTYGDLETTDPGTTYRCKRCRTLVATEGYVVTHKVGRGEKCFATRKKYHVDEKEPECTCLFVEPLKWMQPVVEGYISGKIACRKCNSRLGQFHWAGMQCSCGAWVNPAFQLVKSKIDQCEM

SEQ ID NO: 54798 - protein, 441 aa, Oryza sativa
MGMAPAGRLLLISCLLCVPNSFGFAFAVEEEEDGSGLMPQLSPTGSPNPLVPFLAPAPLAPFFNTTPPNLSGKCSLNFTAVGDLITTTAVDCFASFAPFLANVICCPQLQAMLTILIGQSSKQTGSLALDPTVATYCLSDVQQLLLSQGASDELHNICSLHLSNVTEGSCPVSTVDAFEAVIDSSKLLEACHKIDPVNECCSRTCQNAINDASQKISFKDGGLTSYAGSPKVDSCRNVVLRWLSSRLGPSSAKQMLRQISNCNVNGVCPLSFPDTSKVAKECSGTVKNGTSCCKAMDSYVSHLQKQSFITNLQALDCAQFLGDKLQKMNVSMNVYSSCQITLKDFSLQVGSQESGCLLPSMPSDASFDPATGISFTCDLNDNIAAPWPSSMQASSSSCNKSVNIPERPAATSAQNGVNQNRLELSLLIYLGTLVVAIWLQV

SEQ ID NO: 54799 - protein, 340 aa, Oryza sativa
MGANGNDVVAAAAAGESPMGAARVVAEGGATVFRGADYSLPRTTVALALWLGGIHFNVFLVLASLFLFPLRVAAMVVAFQLLFMLIPLNDKDKLGRKIARFICRYAMGYFPISLHVEDYKCFDPNRAYVFGFEPHSVLPIGVAALADLVGFMPLPKIKVLASSAVFYTPFLRQIWTWLGLIPATRKNFQSYLGAGYSCIIVPGGVQEILHMDHDSEIAFLKSRKGFVKIAMQSGCPLVPVFCFGQSYAYKWWRPKGKLFVKIARAIKFTPIVFWGRYGTPIPFPTPMHVVVGRPIEVEKNSQPTIDEINEVHEQFTVALQDLFDKYKTETGYPGLHLRVL

SEQ ID NO: 54800 - protein, 173 aa, Oryza sativa; identical to SEQ ID NO: 34447

SEQ ID NO: 54801 - protein, 968 aa, Oryza sativa
MELLSGAALAWQQYRALLRKNATLTWRHRRSASLQLLSSLVFIFLIFCIDRAIRSRFSYTTAYRNVPDPAALVAPPIPPCEDKYFVREPCYDFLWSGGGGAGSARVAGIVEAIRRNNPGRPIPAEKVLGFNTPDEVDAWLFQNPMRCPGALHFQVINDTQIKYGIQTNSTPVARRGTYEDPTFKFQIPLQIAAEREMARLLIGDPNFSWTVGFKEFAHPATETFSTIAQAGPTFFLAIAMFGFVFQISALVTEKELKLRQAMSIMGLYESAYWLSWLTWEAFVTLLSALLTVLFGMMFQFDFFLHNNFGILFLLFFLFQLNMLSFAFMISTFVTKAASATTVGFAIFIIGFLTQLVTTFGFPYSTSYQKYYRTIWSLFPPDVFAQALNILGKATATPEDKGISWNQRGQCQSFETDCVITIDDIYKWLISTFFLWFVLAIYFDNIIPNVNGVRKSVFYFLMPSYWTGKGGGKLQEGGLFSFFGSNRPADDASPTDEDVIAEENLVKQQAANNEVDPGVAVQICGLRKTYPGSFSMGCCRCRTTKPFHSVKGLWVNLEKDQLFCLLGPNGAGKTTTISCLTGITPITGGDAMIYGHSVRSTAGMSNIRRMIGVCPQFDILWDALTAKEHMELFASIKGLPPSTIKSVAEQSLIQVKLSQAANVRAGSYSGGMKRRLSVAIALIGDPKLVFLDEPTTGMDPITRRHVWDIIEEAKKGRAIVLTTHSMEEADILSDRIAIMAKGKLRCIGTSIRLKSKFGTGYIANVNFSGNGHTQSPNINGNTEVPVNPNIESVKWFFKERLDVDPKEESRTFLTFVIPHEKEPLLTRFFGELQDREREFGISDIQLGLTTLEEVFLNIAKQAELESSTAEGTLVTLNLSSGSSIQIPKGARFVGIPGTESEDHPRGVMVEVYWDQDDNGSLCISGHSDEIPVPANVQLGRPPSLSRRASVGRGNPVGYIIDPNEVTAAR

SEQ ID NO: 54802 - protein, 244 aa, Oryza sativa; identical to SEQ ID NO: 29588

SEQ ID NO: 54803 - protein, 422 aa, Oryza sativa
MSITSASRRAGAAALPILRRIGGAFRRPFSSEPDPASSPGYHVAGGPSFMRGAVFWEPGRPLTLEDFRMPRPKAGELLIKTKACGVCHSDLHVLKGELPFSSPCVVGHEITGEVVDHGTHTPAEIINRFPVGSHVVGAFIMPCGNCFYCVKGQEDLCESFFAYNRAKGTLYDGQTRLFLRSNGKPVYMYSMGGLAEYCVVPANALAVLPNSLPYTESAILGCAVFTAYGALRHAAEMRAGDSVAVIGVGGVGSSCLQIAKAFGASEVIAVDVLDEKLQNARTLGATHTVNAAKEDAVEKIKEITDGRGVDVAVEALGKALTFSQCAKSVRDGGKAVMIGLAATNVMGEVDITRLVRRQVKIIGSYGARARQDLPQIVKLAESGAFNLKNTISRKCKFEEANSAYEDLDRGKIVGRAVVEIMS

SEQ ID NO: 54804 - protein, 303 aa, Oryza sativa
MAGMSLQHPWAFAFGLLGNIISFMTYLAPLPTFYRIYKSKSTQGFQSVPYVVALFSAMLWIYYALLKSDECLLITINSAGCVIETIYIAVYLVYAPKKAKMFTAKLLLLVNVGVFGLILLLTLLLSAGDRRIVVLGWVCVGFSVSVFVAPLSIIRLVVRTKSVEFMPFSLSFSLTISAVVWFLYGLLIKDKYVALPNVLGFSFGVIQMGLYAMYRNSTPKAVLTKEVEAATATGDDDHSAAGVKEHVVNIAKLSAAVDVVKTREVHPVDVESPPAEAPPEEDDKAAAATAAAVAGAGEKKVAA

SEQ ID NO: 54805 - protein, 406 aa, Oryza sativa
MAGGDQAAAKPPTTLTSAPLPPFAAARCSPAVMAAWPSPWLPLLLVGALLAFEDWLATPTCSGGSTAPAPAPAPAPGDLRVMMVSDLMLLGSDATYADRFFRNHVMSKLFAKSIETLRPDMIVVLGDISAMGFQLKESKWIDVIDQFKGILGQYSDLPLHIALGDKDVGGCANLDDSFVHHMAKHLPGLDSSGCGTFEIGNVSFVSLNSVALLCGNNPLRISVEKVIEKENNHFQQKMVNEAGHFSLGSIEREGFNWRQNSMESGSGPVVLLHFPLYKFSEGTISEPPVSSSLKERGADGRRSDQLHALPANSTQYVLQALKPRIVFSAHDCSFSDYTHYDGTREVAVPAMTWKTTGVPGFVISTFGRKGIMTVRYCLIVPEWYVMAGYSVFLFLTALSVRLSHWM

SEQ ID NO: 54806 - protein, 351 aa, Oryza sativa; identical to SEQ ID NO: 36973

SEQ ID NO: 54807 - protein, 639 aa, Oryza sativa
MLGRAGALSAARWRGGAGTGTGIGIDLRAALRSGGNLLFALFVAAVLAFTLLAAVHSPDDPLLHPSSHQLTAFLTSATSNSTFLADDSVLRTGEDFAAAIGANSSDAAAAAEATVVAEAVPFIKLEDVATKEESSGAERAVTVDTDASSDAGAAAEENPIVEAVSCDTEAPVDCTGDKDLFNLLMRTAIEKFSDLHFYRFGRPVAVPGSPMECDLAWRFRPAEDTNGRTTYYKDYRRFTLTRDVNTCNLVVGNVGEYHSGTGAKRSGRRKGKKGKKGKREAPVTDFVPAKTQMRLDENAANADTTAASEPELVVGEAVNDNLPVVESESEFSRGKYLIYMGGGERCKSMNHYVWGFLCALGEAQYLNRTLVMDLNVCLNSRYTSSGKDEERDFRLYFDFEHLKQSASVIDQSQFWTDWGKWHKKDRLKNHYTEDIKVTPMQLRDVKDTLIMRKFGNVEPDNFWSRVCEGETEAVIKRPWYLLWKSRRLMEIVSAISSRMDWDFDSVHVVRGEKAQNKQLWPNLDRDTSPDSLLTTLNDKVGAGRHLYIATNEPDKSFFDPMKGKYRTHFLDDFKDLWDENSEWYTETKELSNGNAVEFDGYMRVAVDTEVFLRGKRKLETFSDLTRDCKNGVNTCPASS

SEQ ID NO: 54808 - protein, 316 aa, Oryza sativa
MSSSSENPTVTERGGGKDRRDDDGGEKKEGGGGFMEKVKDFIHDIGEKIEGAVGFGKPTADVSGVHIPHISLHRADLVVDVLIKNPNPVPIPLVDIDYLIESDGRKLVSGLIPDAGTIHAHGEETVKIPISLIYDDIKSTYNDIKPGSIIPYLVRVVLLIDVPIIGRIKLPLEKSGEIPIPYKPDVDVEKIKFHRFSFEETTATLHLKLENKNDFDLGLNMLEYEMWLGDDSVASAELTESATIEKQGITTMQVPFSFRPKDFDSAVWDMIRGRGTGYTIKGKIDVDTPFGNMKLPISKEGGTTRIKKDDDDDDED

SEQ ID NO: 54809 - protein, 483 aa, Oryza sativa
MDANSSLNEQKSEELKLKANDAFKANKFSLAIELYSQAIELNSSNAVYWANRAFAHTKLEEYGSAVQDASKAIEIDARYSKGYYRRGAAYLAMGKFKEALKDFQQVKRISPNDPDATRKLKECEKAVQKIRFEEAISVGDEEKRSVADSIDYRIIEVEPQYTGPRVDGDTITLDFVKAMLDEFEKQKCIHKRYAYQIVLQTVQLLRSVPSLVDVNVPDGSHFTVCGDVHGQYFDLLNIFKLNGLPSEENPYLFNGDFVDRGSFSVEVILTLFAFKCLYPTGMYLARGNHESKSMNKIYGFEGEVRSKLGEAFIELFAEAFCCLPLAHVINNKVFVVHGGLFSVDGVKLSDIRAIDRFREPPEEGLMCEVLWSDPQPQLGRGPSKRGVGLSFGADVTKKFLQENNLDLVVRSHEVKDEGYEIEHDGKLITVFSAPNYCDQMGNKGAYIRFTAPELKPNISSFSAVPHPDVKPMAYANNFLRMFQ

SEQ ID NO: 54810 - protein, 649 aa, Oryza sativa
MASEIEVLEDTTTTMAASAAPVAPASPSPSPAAAADGEEGEGPAPAAEDDSLKNDVYTAAAYGDLEKLQRLVEGEGHPVTEPDGLGYHALQWAALNNRVAAAQYILEHGADVNAVDHTGQTALHWSAVRGHIQVAELLLKEGAKVDVADLYGYQATHVAAQYGQTAFIYHIVAKWDADPDVPDNDGRSPLHWAAYKGFADSIRLLLYLDAYRGRQDKEGCTPLHWAAIRGNLEACTVLVQAGKKDDLMVKDKTGLTPAQLAADKSHRQVAFFLDNAKRVYDRGCDGNTNFGKLSKLGLAPVLWCIIVGLLATYIHSVISGQYIMDMTAPFGLFAWSGVFLATAGLVMFYKCSRKDPGYIKANIRDSQNQRDDEPLLKLELDNPALLSGNWSQLCITCKIVRPVRSKHCSTCDRCVEQFDHHCPWVSNCIGKKNKWEFFMFITLEVFAMIITGSAAIIRMVRDPASPASFIPWLSYSAFNHTGALSLFIMDLFLFFGVAVLAVVQASQIAKNITTNEMANSMRYSYLRGPGGRFRNPFDHGARKNCSEFLLNGYNEDIERLDHTSHTDEEMGMIQMTNAVSQNGEGPSHHGNGTGHSCAESHAHSKSHSQVSSSQCCDHSKKTDRTPLGLGLGLGRNSASRQYVRSLLPL

SEQ ID NO: 54811 - protein, 450 aa, Oryza sativa
MAAAATAANLAGKQGVRVVVIGDPGTGKSSLVVSVATEAFPENVPRVMPPTRLPADYFPDRVPITIVDTSSSPEHRAKLIAECQAADAVVLTYACDRPATLERLSTFWLPELRRLQLKAPVIVVGCKLDLRDEQQVSLEQVMAPIMQTFREIETCIECSALRQIQVPEVFYYAQKAVLHPTAPLFDQEAQSLKPRCVRALKRIFILCDHDRDGALSDVELNDFQVKCFNAPLQPTEIAGVKRVVQEKMPEGVNDNGLTLTGFLFLHALFIEKGRLETTWTVLRKFGYDNEIKLRDDLIPTIKRAPDQTLELTGQAIDFLRGIFNMFDTDNDDALLPAELDDLFSTAPENPWSNNPYVDCAERNVLGGLSLEGFLSKWALMTLLDPANSFANLIYVGYSGDFGSAFTTMRKRRVDRKKQQTQRNVFQCYVFGPRGCWKDSIATIIPWKATF

SEQ ID NO: 54812 - protein, 256 aa, Oryza sativa
MANLPPSLSIGAASFAAPSPPPPSPGASSSSSAAAAAAPGAAKDRKMASAEQLVLDLCDPELRENALLDLSKKREIFQDLAPLLWHSYGTIAALLQEIVSIYPSLSPPTLSPGASNRVCNALALLQCVASHSDTRIPFLNAHIPLYLYPFLNTTSKTRPFEYLRLTSLGVIGALVKVDDSEVIGFLLQTEIIPLCLRTMEMGSELSKTVATFIVQKILLDDVGLRYICATAERFFAVASVLSQMFRHLLINLLQDC

SEQ ID NO: 54813 - protein, 246 aa, Oryza sativa; identical to SEQ ID NO: 31619

SEQ ID NO: 54814 - protein, 130 aa, Oryza sativa
MRRRGWGRRRAARFSATSSAEPAEVQSSSSSRKRADALARLRAAFLAAITHRRRRRQLGSSLTGTIFGRRRGRVHVALQTDTRSPPVLLVEMAAYSTGALVREMSSGLVRLALECEKQPINPGEKRRALL

SEQ ID NO: 54815 - protein, 697 aa, Oryza sativa
MGRMIAKFSAHFVLLLVFSLSNDVVVASAAGGDGQFTYQGFAAANLTVDGLATVTASGLLVLTNFTYQAKAHAFHPAPLRFLGESSTAAAGANASGGAGADVARSFSTAFVFAIVSGYDGLSDHGLAFVVAPTANLSAANAGQYLGFLNATNGTASGQILAVELDTIMNPEFHDISSNHVGIDANSLMSTQARPAGYYGDGDGAFRELRLNSRQPMQVWVDYDGQAKQLNVTLSPVQVPKPKKPLLSQAIDLSTVMAEEMYVGFSSATGVVNTHHYVLGWSFGFDGPAPPLDLSKLPRLPRFGPKPRSKVLDIVLPLATAFLVAAVLAAVFFVVRRRRRFAEVREDWEDEFGPHRFAYKDLFRATDGFKDRNLLGVGGFGRVYRGVLPESNLEIAVKRVSHDSRQGIREFVAEVVSIGRLRHRNLVQLLGYCRRKNELLLVYDYMANGSLDKYLHERNVTTLFWPERLWIIKGVASGLLYLHEDWEQVVIHRDIKASNVLLDSAMNGRLGDFGLARLYDHGTDPKTTHVVGTMGYLAPELVRTGKASPLTDVFAFGVFLLEVTCGRRPIETDEHNKRVVLVDLVLEHHRNGSIVGAADPRLTGKFDVEEVALVLKLGLLCSHPLPGARPSMRNVMQYLERGGKSAPDLSPSYVSYSMMAIMQNEGFDSFIMSGGPRSAASIGTVSGASSMTIMSEGR

SEQ ID NO: 54816 - protein, 215 aa, Oryza sativa
MQLLGVLQNLKGITSDQIASQCVLQSYASGNVQLFNKTDAQMLTQFSAHFLSTTDEGCNFAAYVPSEEGTPLQRAEWIKYLGAFTNSEDRANTVYDAIKANYLCLSKAAANLSTRFKPIVAWIEFTQGMWTFVSDGWIVQVMSFVYCSTLNIKLSTKQMKWRQLMRIWYLCHKQYVTDAGAEVVDATITNKRFNNSDPEDMDNFHAILCVSIDNT

SEQ ID NO: 54817 - protein, 344 aa, Oryza sativa
MESGSYEGVLLGMGNPLLDISAVVDEAFLAKYDIKPGNAILAEEKHLPMYNELASKVNVEYIAGGSTQNSIRVAQWMLQIPGATSYMGCIGKDKFGEEMKKDAQTAGVNAHYYEDDNAPTGTCAVCIVGGERSLVANLSAANCYRSEHLKRPENWTLVEKAKYIYIAGFFLTVSPDSIQLVAEHAAATNKVFMMNLSAPFICEFFRDAQEKALPYADYIFGNETEARTFAKVRGWETENTEEIALKISQLPKASGAHKRITVITQGCDPVVVADDGKVKTFPVIVLPEEKLVDTNGAGDAFVGGFLSQLVQEKSIDECVRAACYAANVIIQRSGCTYPEKPDFN

SEQ ID NO: 54818 - protein, 162 aa, Oryza sativa; identical to SEQ ID NO: 28955

SEQ ID NO: 54819 - protein, 667 aa, Oryza sativa
MAMATPMAPRSTFAIFLILLLRSGHSPAAAFYLPGSYPHRYRPGEALAAKVNSLTSPSSKLLFPYYSLPFCAPQGGVNSAAESLGELLLGDRIETSPYRFSMLKNATAFLCRTDPLPPATADLLMFRIDDAYHVNLLLDTLPVVRYVKNMAAPGVFVRSTGFPVGVRADDGEYYVYNHLKLTVLVNKPRNGTTRAEALMATADAVELISFAGGSKDGGGYTVVGFEVVPCSVEHDAAAIKGKKMYDELPARAAAGCDPSVVGMRVRANRPLVFSYEVAFVESGVEWPSRWDAYLEMGGAKVHWFSILNSIVVVAFLAAILLVILLRTVRRDLAQYDEHGGEAGLAPQADELAGWKLVAGDVFREPAHHPLRGARVHVAGVARRARDGHARHLPPPRLRGGVRRRAALEDGAARGQRRVEARGVARLLRLPRRGLRRLHRAQLRALVQRQHGRRAVPALRRDPPPLGVRLRAAHPRRRAGGIPRRAPRVPGEDEQDREAGAGGAVLAVGVRGGGGDAAVRDAVHRAAVHHVEPVAGEGVLRVRVPAGGDGAAGGRVRRGVGGAHLHGALRGGLEVVVARLLRLGLRRGLHPRLRRLLPRLRPAQPQRPGLRRALRRLLAAHGARRHARHRRRRARRLLRLRLLPLLRRQARLIHGVIVRTVHVISLCR

SEQ ID NO: 54820 - protein, 90 aa, Oryza sativa; identical to SEQ ID NO: 52037

SEQ ID NO: 54821 - protein, 51 aa, Oryza sativa
MSNLEISCSPVNWQRGILLTSTWQMTFTRSSFETVNLRQSHVGRIPYLSLH

SEQ ID NO: 54822 - protein, 512 aa, Oryza sativa
MPLRSATRQLSFELLGEGGLAAADDADDDLSPRSFPDTTSDGQRRRRRRSKRKRGLRSPPIEEEEKEGTPRRGGVVGVSDLVSVSVVERESSDAERSAASCVTYVGVGVELRQRSVSGSGRVVSREDATSSCGSSARESAAAAAAVPEAAPAAWRPEANGGGKKLEKEDSLDWERYMKENGNVLGEVERLDNSPFRYFLGELYGGNSLRGTISAGNDKKRQRVYNTMFHVPWRCERLIVAGFFVCLDSFLSLLTIMPARIAITVWRVLKTRQFLRPNAADLSDYGCFVVLALGVASLQMIDISLIYHVIRGQGTIKLYVVYNVLEIFDKLCQSFGEDVLQVLFNSAEGLSTCSTDNATFELMRFILDEAIAVLAFVVHSFVLLAQAITLSTCIIAHNNALLALLVSNNFAEIKSNVFKRVSKENLHNLVYYDIIERFHITSFLLFVLAQNILEAEGPWFDSFLINASLVFMCEVLIDAIKHSFLAKFNEIKPVAYSEFLEDLCKQYSCNFDT

SEQ ID NO: 54823 - protein, 629 aa, Oryza sativa
MPEAVAAAVSPAAAAATAMCAEHREKLEHIERVTRNAGQEQRRVLEEILAQNAQAEYLRRLGVPGDAPGADEAFRRLAPLVTYEDILPDVLRIANGDTSPILSGKPVSEFLTSSGTSGGERKLMPTIEEEMERRSGLYSLLMPVMSRQVPGLDKGKAMYLYFVKSEWRTPGGLPARPVLTSFYRSRYFLERPHDPYTVYTSPDEAVLCEDAYQSMYAQLICGLVHRADVLRVGAVFASGFLRAIRFLEKHWPSLCRDIRAGELDGGVTDPAVRGAVGRVLRGADPALADAIEAECARPSWQGIIRRVWPSTKYIDVIVTGAMAQYIPTLEFYGGGLPLACTMYASSECYFGLNLNPMCKPSEVAYTLIPTMCYFEFLPVNSGANDVAAPEPDHRGLVDLVDVKLGHEYELVVTTYSGLYRYRVGDVLRVAGFKNAAPMFAFVRRKNAALSIDSDKTDEAELHAAVTEAVQHLAPFGASLVEYTSYADTATTIPGHYVLFWELRSPAGGTPVPASVFEDCCLAVEEGLNSVYRQCRAADRSIGPLEIRVVADGTFDKLMDYALSRGASINQYKAPRCVRPGPVVELLDGRVQATYFSPKCPKWCAGGNKQWISSGAAAKKTTTTCDSLAV

SEQ ID NO: 54824 - protein, 379 aa, Oryza sativa
MPRSRGSELPQRASPRAPLHLKTTACSDANGAHHRTVVDRSSPKLADRHSPRSPLHEKKRAGTRVAELETKLGKVQDELKKLREQLATAEAAKKDAQVALEEAKKRVGTKGSPASAAAASPRSPSPVAVETPKKTELQLKVTEPPAEEESSINSPATDVFEVVRTESGDKENQSAAGAEDGEEVSCGIKAALAEKELEEEETKKMIEEESIDATAIDSGEKENPEVAELKAKLMAKDMEVAILTADNAELKKQVGEAAEAAKKAEEEAAAKASLVEQDLKERAAREARMGEQLRASEAARETLEAEMRRLRVQTEQWRKAAEAAAAVIGGDAHFVGHNGNGWGSPATMPDDCDDEGFGGKRKGAGIRMLGDLWKKKGSK

SEQ ID NO: 54825 - protein, 498 aa, Oryza sativa
MDHNTDPPPTTMVDAAAALLLEPKLEGYDDDGGGEPLQPAPFVSPLDQLMQPPRPLEALLQGPQLPPFLSKTYDLVCEPELDGVISWGHAGNSFVVWDPSAFARDVLPHHFKHNNFSSFVRQLNTYGFRKVHADRWEFAHEDFLRHSKHLLKKIVRRRSSPTQQSGLQPGSSGESGLDPELNTLRREKSALLQEVTRLKQEHLQTIEQMSTLNQRLESAEDRQKQMVSFLAKLLQNPTFLRQLKMHRQQKEIDSTRVKRKFLKHVPHGNIDSGESSSQHTGESNLDFSPTSLDLPATHSDILDLQNFLLEDGDLNLAMLPENIGLDGIEAPDDIGALVQGFDTQEELELGSGVELLEIPPASGPRGQDPTIGRSKGKNVLSPGLDATSSEADCLGSFSDNMGMLSDSMLQTAGKLMDADDDERIWGVDASSALQSSCSGTSQQAYGSLVSDPYLMEMANKPEKFWELDFQALDDGDLQLDKCVIDDPALQQQRGNMNS

SEQ ID NO: 54826 - protein, 464 aa, Oryza sativa; identical to SEQ ID NO: 45303

SEQ ID NO: 54827 - protein, 186 aa, Oryza sativa
MSLKSIVRELREMRDGIGSMSRRAADGRAGGGRGGSRHSWPVLWSEQQQPPQQQQLQRQEHQQQQGRWANLPPELLLDVIQRVEASEATWPARRQVVACAAVCRSWREVTKEVVKTLEECGRITFPISLKQPGPREHPVQCFVRRDRATSTYLLYLGLSPCKLNLHLCFWLLTKYMAYKSCSTTNL

SEQ ID NO: 54828 - protein, 493 aa, Oryza sativa; identical to SEQ ID NO: 47420

SEQ ID NO: 54829 - protein, 262 aa, Oryza sativa; identical to SEQ ID NO: 33290

SEQ ID NO: 54830 - protein, 320 aa, Oryza sativa
MRIEELPGDSGGGGGDGGGGGGGGALLQLRRGAAAAAAAVEEEGGVVMRVAFDAKRAAVGVGARMLFYPTLVYNVVRNRFEPQFHWWDQVDEHVLLGAVPFPSDVLRLKELGVCGVVTLNESYERLVPRCLYEAHGIENLVLPTRDYLYAPSFENLCRAADFIHRNALCGKLTYVHCKAGRGRSTTVVLCYLVQYKQMTPAEAYEHVRLRRPRVLLASAQRQAVEQFYQLRVKKFGKSICLDSPIMKPPLFLATRNLIAFDEKTFVMVSKSDLEGYDADTLAVNVGSGFVGDKPSIPRAVCEPGGLCRVLIPVGTMPCPP

SEQ ID NO: 54831 - protein, 260 aa, Oryza sativa
MSSVLLFLLLLLLSGVSLSGCIRLGNGGYEEWRMGSATYIKESLGHPLNDGGGACGYGDLDIFRYGRYTAGVSGALFGRGSACGGCYEVRCVNHVLWCLRGSPTVVVTATDFCAPNLGLSDDYGGWCNFPKEHFEMSEAAFLRVAKAKADIVPVQFRRVSCDRAGGMRFTITGGASFLQVLITNVAADGEVAAVKVKGSRTGWIPMGRNWGQNWQCDADLRGQPLSFEVTGGRGRTVVAYSVAPPDWMFAQTFEGKQFVE

SEQ ID NO: 54832 - protein, 406 aa, Oryza sativa; identical to SEQ ID NO: 45522

SEQ ID NO: 54833 - protein, 547 aa, Oryza sativa
MGNCCRSPAAAAREDVKTSHFPASTGGGKKKPHQARNGGGGGGGGGGGGWEKKRLSVLGEEGSEVNGGIEEKYALDRELGRGEFGVTYLCMDRCSRELLACKSISKRKLRTPVDVEDVRREVAIMRHLPRSASIVSLREACEDDGAVHLVMELCEGGELFDRIVARGHYTERAAAAVTRTIVEVVQLCHRHGVIHRDLKPENFLFANKKENSPLKAIDFGLSIFFKPGEKFSEIVGSPYYMAPEVLKRNYGPEIDIWSAGVILYILLCGVPPFWAETEQGVAQAILRGNIDFKREPWPNVSDNAKDLVRQMLQPDPKLRLTAKQVLEHTWLQNAKKAPNVPLGDIVKSRLKQFSRMNRFKRRALRVIADHLSAEEVEDIKDMFKVMDTDNDGIVSYEELKSGIAKFGSHLAESEVQMLIEAVDTNGRGALDYGEFLAVSLHLQRMTNGEHLRRAFLFFDKDGNGYIEPEELQEALVEDGATDIMEVVKDILQEVDTDKDGKISYEEFVAMMKTGTDWRKASRHYSRGRFNSLSIRLIKDGSVKLGNE

SEQ ID NO: 54834 - protein, 671 aa, Oryza sativa
MGMVGAYADPFLPPKMALSAYAAPMGEYGQPQPQPAPRPPACPYSSSSSSPPPVSASYHSWPPATSASPVSSPPPVSSPPESFPSSPPPALSPPPPDAPPPSLPPSPPPSPPPSPPHVEVQAPPPPMTTDQPHVQPRVYTSPPPPSLPPPPPQTFSPPSPPPFHPPSSSPAPAPVPAAVVYPPPPPPRIASPPPPRNHIKPHYVPRSSARSHSNSTRASSGAGKNIEISREAATTIVALAGLAMLSFVGATIWFVKKKRRRIEPPASLPTQQPAPPPPPNYFPSSGGSSLTSDAFFISPGYHPVRLFSAGSHGYPYSPADSAIGYSRMLFTPENLAEFTNGFAEQNLLGEGGFGCVYKGILPDNRLVAVKKLKIGNGQGEREFKAEVDTISRVHHRHLVSLVGYCIADGQRMLVYDFVPNNTLYYHLHVSEAAVLDWRTRVKISAGAARGIAYLHEDCHPRIIHRDIKSSNILLDDNFEAQVSDFGLARLAADSNTHVTTRVMGTFGYLAPEYALSGKLTAKSDVYSFGVVLLELITGRKPVDASQPLGDESLVEWARPLLLKAIEHREFGDLPDPRMENRFDENEMYHMIGAAAACIRHSAAMRPRMGQVVRALDSLADSNLNNGLQPGRSEVFLEPQSEEIRLFQLREFGSRDCSDEMSQASWRSRRDL

SEQ ID NO: 54835 - protein, 690 aa, Oryza sativa
MMEVADKIVEPKGPLVATAQLPNNVELLKSVVLNPSREGGSSQEQYEKDLLAEGEESFRSEESSDEGGRSSFSGVSHPPEPIDVDLMSTVYVAIDEEKPEPPECLMRGLSVKGASMEDLSVHAMDAKPDVIVCTVNVNGLVEERKVHCAVVAPDAVEAVSSTQASEEKDCVWDASFPPSGNVSPHSSSDSTGAVAATSIRGRSTSTCRSGVLTSESILTVEKTCESAKDSTRGNSMESTKTSMSRASDSSGVSDDSNWSNITGSANKPHKGNDPRWRAILAVRGRGNVLGMSHFRLLKRLGCGDIGSVYLSELSGTRCYFAMKVMDKASLASRKKLNRAQTEREILQLLDHPFLPTLYTHFETDRFSCLVMEFCPGGDLHTLRQRQPRKHFSEYAARFYAAEVLLALEYLHMLGVVYRDLKPENVLVRDDGHIMLSDFDLSLRCAVSPTLIRASASDSDPRRAGGSFCVQPACMEPSSVCIQPACFMPKLFGQRSKKQGRRPRSELGQGGGAALPELVAEPTSARSMSFVGTHEYLAPEIIKGEGHGSAVDWWTFGIFLHELLYGKTPFKGSGNRATLFNVVGQQLRFPESPSTSYAGRDLIRGLLVKEPQQRLGVKRGAAEIKQHPFFEGVNWALIRCSTPPEVPRHVEAELPAKYGVAEPVASGGGGGKRVVGAEVRSGGKYLDFEFF

SEQ ID NO: 54836 - protein, 568 aa, Oryza sativa
MARGGGGGEEAAEEEREVSEALTADSSADEECRRGSSSSSASSGDASSESYCPPDEWQKVAIKTCVSSDLVVVSAEPAKEKKPPPPPSSPRVDAAPADKHHRPSEMEMMKERFAKLLLGEDMSGGGKGVCTALAISNAITNLCATIFGQLWRLEPLLPEKKTMWRREMDWLLCVSDHIVELVPTWQTFPDGSKLEIMTSRPRSDLYINLPALRKLDHMLLEILESFRDPEFWYVDQGICPPDRDGSAPFMLTFHRRDEKWWLPVPRVPPGGVGETTRRQLEHKRDCASQIFKAAMAINSNALAEMDVPDSYLDSLPKNGRATLGDIIYRYITSDQFSPDCLLDCLDLSSEYQALEIANRVEASIYVWRRRGTSGAASRAGNKSSWGIVKDMIMDTEKRDDLLADRAEGLLMCLKQRFPGLTQTSLDTSKIQYNKDVGKSILESYSRVLESLASNIIARIDDLLYVDERSRQAELLPTAGAGSGKISCMPAMSASSVPAYPVVSTSGTPPPYATAYATPSFSPAQLSSPSNIGRALLVDRRSHDGRAFDGSMEFMGMAVSNAVFDLPGL

SEQ ID NO: 54837 - protein, 692 aa, Oryza sativa
MRERDVCWEYCDKMEGNKVRCRFCYKVLNGGISRLKFHLSQISSKGVNPCTKVKPDVVEKVKAVIAAKEEHRETQVLKRQRDTELSVRPRRIRDLPSQPTSPERATSPAITSTSDQTQFLALEVSTPVLKLSSVTNKARSAPQSEAERCIAEFFFENKLDYNIADSVSYRHMMEALGGQGFRGPSAEVLKTKWLHKLKSEVLQKTKEIEKDWATTGCTILADSWTDNKSKALINFSVSSPLGTFFLKTVDASPHIKSHQLYELFDDVIREVGPDNVVQIITDRNINYGSVDKLIMQNYNTIFWSPCASSCVNSMLDDFSKIDWVNRCICQAQTITRFVYNNKWVLDLMRKCIAGQELVCSGITKCVSDFLTLQSLLRHRPKLKQMFHSSDYASSSYANRSLSSSCVEILDDDEFWRAVEEIAAVSEPLLRVMRDVLGGKAAIGYIYESMTKVMDSIRTYYIMDEGKCKSFLDIVEQKWQVELHSPLHSAAAFLNPSIQYNPEVKFFTSIKEEFYHVLDKVLTVPDQRQGITVELHAFRKAQGMFGSNIAKEARNNTSPGMWWEQYGDSAPSLQHAAVRIVSQVCSTLTFQRDWSIIVRNHSEKRNKLDKEALADQAYVHYNFMLHSDSKMKKGDGDPIALDAIDMTSPWVEDSDSPNLAQWLDRFPSALDGDLNTRQFGGSIFGTNDTLFGL

SEQ ID NO: 54838 - protein, 411 aa, Oryza sativa
MAESTAATAPPGDEPEAKGRSNSILLPILGILLVYLLYRYLRPRLRGLRLDRLTSRLPACLRRSRTANTMLPYFAPIADRLGALQPYLAPIADRLGVGAQGGVGAGAYGRADALVKFPGGEALSVAAILEAPGEVVAKSSHSTLYRAAMRSGEAAVLLRFVRPACALTSDEASAAARRIGAVSHPNLVPLRAFYVGPRGEKLLVHPFYAAGSLRRFLQEGIVDSQRWNIICKLSISIVKGLDYLHTGLEKPIIHGNIKTNNILLDANYECKISDFGLYLLLNPAGAQEMLETSAAQGYKAPELIKMRDATRETDIYSLGVVLLEMLAQKESAKDNTPNPRDILLPVSFKNLVLERKISDAFSSDLVRQSKKSGKEKNLNAFFELATACCSPSPSLRPNTKFILKKLEEIAK

SEQ ID NO: 54839 - protein, 314 aa, Oryza sativa; identical to SEQ ID NO: 37664

SEQ ID NO: 54840 - protein, 334 aa, Oryza sativa; identical to SEQ ID NO: 31192

SEQ ID NO: 54841 - protein, 535 aa, Oryza sativa
MAAASSAPFFGLGDTQMPPPQNPTNPALHHHPNPSPAPVAAAAPAPKKKRNQPGNPNPDAEVIALSPRTLMATNRFVCEVCNKGFQREQNLQLHRRGHNLPWKLKQKNPKEARRRVYLCPEPSCVHHDPSRALGDLTGIKKHYCRKHGEKKWRCDKCSERYAVQSDWKAHSKTCGTREYRCDCGTLFSRRDSFITHRAFCDALAQENARMPPIGAGVYGGAGNMTLGLTGMAAPQLPAGFPDQAGQPSASAGDVLRLGGGSNGASQFDHLMASSSGSSMFRSQGSSSSSFYLANGAAHHAPAQDFGPEDGQSQAGQGSLLHGKPAAFHDLMQLPVQHQQSGNGNLLNLGFFSGSNGGVDQFNGGAGNGGQGSIVTSSGLAGNHGGGGGGFPSLYNSSEPAGTLPQMSATALLQKAAQMGATTSSYNAGGAGGASSLLRGASSHGISVGEGPANERSSYQNLIMGSMASGGGGAGFAGSFSGASGFGGAVDDGKLSTRDFLGVGVVQGISGSAAMGPPRHGAAGLHVGSLDPANMN

SEQ ID NO: 54842 - protein, 424 aa, Oryza sativa
MLQDIMNTKKIKLHDCHFGSPLCDPSPAPHLLSSAAAAGLSFHPGLVSSAAQHQQHGAGGWLHEEYYAPRSSPPSSLLAQTCVGSNATAFYAAENLPQFDFPALGTAAAAAAKAPFRSSESELYRPVDPLLLRADHSVRTYYVRPQKRDSGERTPLPPPSQQQHQDRIHGLFAGAPTTRLLSGEPKIHSFPPQVAAKPILPAMDAPSLQNQMENQLTRNCIGAATPVTPTGNLAGSGAPSKTRIRWTQDLHERFVDCVNQLGGADKATPKGILKLMNSDGLTIYHIKSHLQKYRIAKYMPASSEGKQLEKRATGNDMQNLDPKTGMQITEALRVQLDVQRRLHEQLEIQRNLQLRIEEQGKRLQKMFEDQLKASRSVMEPQELDDVVAFAAGDGDDDAFDDVDVQLLAVAGSGYDDAGFQSKIS

SEQ ID NO: 54843 - protein, 79 aa, Oryza sativa
MDDLEQWNHYDLWARENLPLLLWNSLDMNRDFYTCLCKLHVFEKISGNLYCFIQNKVLPSSSYCLVEYYGSWCKSSLFD

SEQ ID NO: 54844 - protein, 84 aa, Oryza sativa; identical to SEQ ID NO: 47627

SEQ ID NO: 54845 - protein, 533 aa, Oryza sativa
MMPVRTYHHHHHHNNSNNHRLRRIIPRVLLAVFAIYAVSFAAYLLRHQSPHPHPHPAADPERDAVDAAGGGGGGGAVDRVRVEAPSSQKPWPRLPSFLPWTSASVRPPPKHSCEGYFGNGFSRLVDVLPARGGGGGGWFRCHHSETLRSSICEGGRVRLDPGLIAMSRGGEPLDQVMGRAEEEELPKYEPGALQVEAAAKRTGPLVEAGFLDAYVPTGGIGMHTMRSLLDSGRVVPPGELHCSQWVEEPTLLVTRFEYANLFHTITDWYSAYVSSRVTDLPNRPNVVFVDGHCKAQLEQTWEALFSNVTYVKNFSGPVCFRHAILSPLGYETALFKGLSESFSCEGASAESLREKPDHQKTARLSEFGEMILASFDLLRDDILSSKTSNGLNVLFVRREDYLAHPRHSGKVESRLSNEKEVYDAIEGWVKGQKCKINVINGLFAHMNMKEQLRAIQEASVVIGAHGAGLTHLVSATPDTKVLEIISSMYRRPHFALISHWKSLEYHAINLPGSYARVTDVINELSNILKGFGC

SEQ ID NO: 54846 - protein, 494 aa, Oryza sativa
MVVVVVGGGGGGGGGGGVKKEEGEEEARGRGGGGGVVGGWGTWEELVLGSAVIRHGGVAWGAVAAEVRSRSPCAFSPEECEAKFSEIQARYSACDAWFEELRKRRVAELRNDLKKSENFIGSLQSMIKSLSNSKHDDGNSECHTSHTESCSNNENTADNNSSSKALSKDRSSAASFTEEASNSQKSEKVQHCDTDSIQVNNTSAEVLVKPLVEKKVCAEDGLLWGSRKKRAVRDRRTFLMADNSCRAGENTSTSHIQTDGSSEGYAKKGLKTPNLESGVSVVEKAKPNLAEILKTISTQSDCYMLQRRLDVQRKRTRYKKMIRRHIDFRILHSKIKSGATSSTKELLRDILLFVNNVLAFYPKATLEHMAAIELRNIAFRTVQESASMPSKSCGVTGAATAPLVKKNTRPVQPGSHGPHDAKRSKVSLKGTGSTVKQGEAKGSRGGSSVTANVKTMQRNPPAKKRGVGRPPKNGQKRAAAQQDSPNKGRKRTRR

SEQ ID NO: 54847 - protein, 416 aa, Oryza sativa
MFGRVPRSNNTKYYEVLGVPKTASKDELKKAYRKAAIKNHPDKGGDPEKFKELSQAYEVLTDPEKRDIYDQYGEDALKDGMGGGSDFHNPFDIFEQFFGGGAFGGSSSRVRRQRRGEDVAHTLKVSLEDVYNGSMKKLSLSRNILCPKCKGKGTKSEAPATCYGCHGVGMRNIMRQIGLGMIQHMQTVCPECRGSGEIISDRDKCTNCRASKVIQEKKVLEVHIEKGMQHGQKIVFQGEADEAPDTVTGDIVFILQVKVHPRFKRKYDDLFIERTISLTEALCGFQFILTHLDSRQLLIKANPGEIIKPGQHKAINDEGMPHHGRPFMKGRLFVEFNVEFPESGVLSRDQCRALEMILPPKPGHQLSDMDLDQCEETTMHDVNIEEEMRRKQYQRKQEAYDEDEEEDAPRVQCAQQ

SEQ ID NO: 54848 - protein, 265 aa, Oryza sativa
MPCLLQLIDLYWTVIPVMLLHYYRAHPAAVADTARSAVAVALTWVWSARLTHNYLRREGWQWGKREDWRFAEMRGQYGRAWWWMSFFAVYLSQQVFLIGICLPMYAIHSTTQPWGAWDVVATMACLAGIVIAHFADTQLHRFVTTNEKLKKVGEPTVLTMEAGLWRYSRHPNYFGEQLWWWGLYLFAWNIGQPWMVVGPLVNSLCLGYVTVLVERRMVKQEHRAEAYKLYQKRTSVWIPWFRKPVPQPYNHKDSSNQNSLKISHS

SEQ ID NO: 54849 - protein, 405 aa, Oryza sativa; identical to SEQ ID NO: 36521

SEQ ID NO: 54850 - protein, 469 aa, Oryza sativa
MDMDMSSAYPHHWLSFSLSNNYHHGLLEALSTTSAPPLGEEGPAEGAPKMEDFLGGLGGGGGAVAAAPAAAPEDQLSCGELGSIAAGFLRRYPAPENAGGVTIAMATDAAAELADPARRTAETFGQRTSIYRGATRHRWTGRYEAHLWDNSCRREGQSRKGRQVYLGGYDKEEKAARAYDLAALKYWGPTTTTNFPVANYETELEEMKSMTRQEFIASLRRKSSGFSRGASIYRGVTRHHQHGRWQARIGRVAGNKDLYLGTFSTQEEAAEAYDIAAIKFRGLNAVTNFDMSRYDVDSILNSDLPVGGGAATRASKFPSDPSLPLPSPAMPPSEKDYWSLLALHYHHHQQQQQQQQFPASAFDTYGCSSGVNVDFTMGTSSHSGSNSNSSSSSAIWGTAAGAAMGRQQNGGSSNKQSNSYSGNNIPYAAAAAMTSGSALYGGSTGSNGTWVASNTSTAPHFYNFLFGME

SEQ ID NO: 54851 - protein, 367 aa, Oryza sativa
MLQIFSRIATRIPQRVICASNSYSSNYRSTSTSSPMNSNEMLGAQETVSTEGNNSCSSVQSTPDIEKKYVHRVYDAIAPHFSSTRFAKWPKVAGFLNSLRPGSVILDAGCGNGKYLGFNPDCLFIGCDISPPLIDICAGRGHEVLVADAVNLPYRDNFGDAAISIAVLHHLSTDARRRKAIEELIRVVRKGGLVLITVWAVEQEDKSLLNKWTPLCEKYNEEWVDPSSPPVRNQSNTVLESISETDEDTGAVKQRNDDLKISNDGLDDNADVTCSNSNIDEYHKTQQEYFVPWHLPFHRAEIGGASAAALENGFAKRDDKKGTVVYNRYYHVFVEGELQRLVAGINNAVVVDQFYDKSNWCIVLEKL

SEQ ID NO: 54852 - protein, 774 aa, Oryza sativa
MPPKARRGAAAAGRKGPGTRGRLVKAQAAVEEVPAEEVKAAEEAPKVEEQKRQPSPPLQQPAAEEKASSDAAANGASHGEDEGTTKETYEEDKGERLEFEDEPEYEEEAAVDYDEKDLEQYEEQYEDGDEVVEYTEDVIEEETDMVDEELDGGDDGEGEGYENAEEEHNVDVEDEEHHEMVKEHRKRKEFEVFVGGLDKDATESDLRKVFGEVGEITEVRLMMNPVTKKNKGFAFLRYATVEQARRAVSELKNPSVRGKQCGVAPSHDNDTLFVGNICKTWTKEHLKEKLKSYGVENFDDLLLVEDSNNPGMNRGYALLEFSTRPEAMDAFRRLQKRDVVFGVDRSAKVSFADSYPEVDDEIMAQVRTVFIDGLPPSWDEDRVKKYLKKYGAIEKVELARNMPAAKRKDFGFVTFDTHDNAVACADGITNSEIGEGDSKAKVRARLSRPLQRPPRMKHGLRGNFRVGQGAPRGGRFAYDRPPPLRRPPPRLLRPDVSRLPPPVRSRPLKRPVDIRDRRPVMSIPDRVRRLPPPERSYDRRPPAPVYPKRSPRREYGRRDELPPPRSRATFGDYSSRVPVDRRPYRDDYSPRGSAYSDLGPRSAPRLSDRRAYIDDGYGGKIDRPLPTYREGRGRDYDTMSGSKRSYAEMDDVPPRYHDISVRQSKARLDYDVGGSSARYADTYSERLGRSHAGYSGGRSVSGHDPVYSSGRHGMSYGGSASSNDAGGMYSSNFSGSYMSRGSDVGGSSYSSLYSGRNVGSSSGYYGGSGSSSYY

SEQ ID NO: 54853 - protein, 540 aa, Oryza sativa
MSPPPLRLLLFLLLLHLPSSLSSRHHHHAPSPSKPAPASYAAPLAVLLACNATRFQPACVSTLSNASADASTPDLLAATLSALRARIPPAVSTARSVLAASSNVNLTNAATNCLTFLSFSTHRLSPPPSTSSPSLLSASTALLDLYDCWSAYKYVNFSRTISDAMAYLDDTIAVNSNYISMLAALQRYGDDTFRWAPPQTERDGYWPPAAAGSAADEDALGVPKGLPPNVTVCGAGCHYKTVGEAVAAAPDYGDEMFVVHVKEGVYKETVNVPLEKTNVVVVGDGMGKTVITGDLNADTPGVSTFNTATVGVLADGFMARDLTISNTAGPDAHQAVAFRSTGDRTVLDTVELLGHQDTLYAHAMRQFYTRCRVSGTVDFVFGNSATVLRDTALIVLPRQLRPEKGENDAVTAQGRTDPAQPTGIVLRGCVVNGSDDYMALYREKPDVHHVYLGRPWKEYSRTVYVGCTLSEIVQPRGWMAWNGDFALKTLYYGEYESAGPGGDGASGSRIGWSSQVPRDHVDVYSVASFIQGDKWIPKIH

SEQ ID NO: 54854 - protein, 75 aa, Oryza sativa
MVEKRRRSPHPLLLPLPLPPGRFVSRRRRRMGSRNHRRLPSSCPLVSSILPCATHAGEMRSAQAMWQWATPRSRD

SEQ ID NO: 54855 - protein, 467 aa, Oryza sativa
MAVTAEMESSPAATGKLRYNSPLVQVSLIGLVCFCCPGMFNALTGLGGGGQLDHSTADNANTALYSCFAVFGVLGGAAHNLLGPRVTLLAGALTYPLYAASFLYYNHHPSRQAFPVTAGALLGVGAGLLWAAQGAIMTSYPPPSRRGSYISLFWCLFNLGGVLGGLLPFSLNYHRAADAASVNDATYIAFMAFMLLGAGLALLLLPASRIVRDDGSRATRMSYSSVSTEGWEILKLFANWRMLLVLPAAWASNFFYTYQFNNVNGRLFTLRTKGLNNVFYWGAQMLGSAAIGYFLDFGFGSSSRRRRGLCGVAAVAVLGTAIWAGGLANQLRYADGNWGERLIDFKDGRRYAGPFLLYFSYGLLDAMFQSLIYWIIGALANDTQILSRYVGFYKGVQSAGAAVAWQIDTHKTSLISQLIVNWALTTVSYPLLALLVFLAVKEEDSSVSSVEDGKEKDSKLSAPTSFH

SEQ ID NO: 54856 - protein, 227 aa, Oryza sativa
MQGARVNLKGWQQAAVAFGSAFGALLDPRRADLIAALGETTGKPAFQRVLQRMRNSAEGRDVLLERPRVISTQVSHAWDMPQNTFGAAYAQFMGSRNFSPDDRPPVRFMDTDELAYVATRAREVHDFWHVLFGLPTNLIGETALKVIEFEQMFLPMCMLSVVGGSARFNEKQRTLFFQHYFPWASKAGLKCTDLMSVYYEKHFHEDLDEVRRNWGIIPCPDPKRSSV

SEQ ID NO: 54857 - protein, 235 aa, Oryza sativa
MASGGGDARRRKEEGEEDGFSSDGGDTTDAESSDERAGAGAGRRAVPGANPILSRLAVSRNPSPLAAATAAPGVCLLRFAWESAAGSLVGAVVGYGKGLVTTKGFKGSFADAASSAKIFAVLAGVQSLVACTLRQLRGKDDVLNAGIAGCCTGLALSFPGAPQTMIQSCLTFGTFSYIIEMLNKQEPALARPSITGTKDLKAGHRVLPPFTLPLPQEAMEGFSSFQNFLSKFQGK

SEQ ID NO: 54858 - protein, 463 aa, Oryza sativa
MASVSPLLLLLLCSYHSVVAHAGDGQSYKVLELNSEAVCSERNAISSSLSGTTVALNHRHGPCSPVPSSKKRPTEEELLKRDQLRAEHIQRKFAMNAAVDGAGDLQQSKVSSSVPPKLGSSLDTLEYVISVGLGTPAVTQTVTIDTGSDVSWVQCNPCPNPPCYAQTGALFDPAKSSTYRAVSCAAAECAQLEQQGNGCGATNYECQYGVQYGDGSTTNGTYSRDTLTLSGASDAVKGFQFGCSHVESGFSDQTDGLMGLGGGAQSLVSQTAAAYGNSFSYCLPPTSGSSGFLTLGGGGGVSGFVTTRMLRSRQIPTFYGARLQDIAVGGKQLGLSPSVFAAGSVVDSGTIITRLPPTAYSALSSAFKAGMKQYRSAPARSILDTCFDFAGQTQISIPTVALVFSGGAAIDLDPNGIMYGNCLAFAATGDDGTTGIIGNVQQRTFEVLYDVGSSTLGFRSGAC

SEQ ID NO: 54859 - protein, 328 aa, Oryza sativa
MGAAAGDGREEEGVMATDFFWSYTDEPHATRRREILAKHPQIKELFGPDPLAFLKIAAVVSLQLWTATLLRDASWVKILTVAYFFGSFLNHNLFLAIHELSHNLAFTTPSYNRWLGIFANLPIGVPMSITFQKYHLEHHRFQGVDGIDMDIPSQAEAHAVKNTLSKSVWVVFQLFFYALRPLFLKPKPPGLWEFTNLIIQIALDASMVYFFGWKSLAYLILSTFVGGGMHPMAGHFISEHYVFNPDQETYSYYGPLNLMTWHVGYHNEHHDFPRIPGTRLYKVREIAPEYYNNLKSYKSWSQVIYMYIMDQTVGPFSRMKRKAPKKDS

SEQ ID NO: 54860 - protein, 152 aa, Oryza sativa
MTLCANSCGFPGNPATNNLCQNCFLAASASSSSSSAAASPSTTSLPVFPVVEKPRQAVQSSAAAAVALVVERPTAGPVESSSKASRSSSVNRCHSCRRRVGLTGFRCRCGELYCGAHRYSDRHDCSFDYKSAARDAIARENPVVRAAKIVRF

SEQ ID NO: 54861 - protein, 301 aa, Oryza sativa
MAAAAAAALITAASTPFPLVSFRSRRDGHLSLSPPRRPGAGRCRASAPTFQGGPAASYAREMERLSAKESLLLAFRDAGGFESLVSGKTTGMQKIDVNERIVGLERLNPTPRPTTSPFLEGRWNFEWFGDSSPGALAARLLFERSPTTVAHFTGLDVLIKDGYSKISSNVKFLNTVQSKFLLTTQLSVEGPIRMKEEYVEGLIEIPRIREETLPDQLKGFFGQTAGALQQLPAPIRDAVSEGIKLPLNGMFQRLFMISYLDEEILIIRDASGAPDVLTRLEGPQPNSIDGTSDAVLSEYES

SEQ ID NO: 54862 - protein, 202 aa, Oryza sativa
MTAAETQEELLRKHLEEQKIEGDEPILEDDDDDEDDDDDEDDKDDDVEGAGGDASGRSKQSRSEKKSRKAMQKLGMKTITGVSRVTIKKSKNILFVISKPDVFKSPNSDTYVIFGEAKIEDLSSQLQTQAAEQFKAPDLSNVISKAEPSAAAQDDEGVDESGVEPKDIELVMTQATVSRSRAVKALKAANGDIVTAIMELTN

SEQ ID NO: 54863 - protein, 524 aa, Oryza sativa
MQTSKTRNGPSDAPQKASPATPRSSRVAKTGGNETDSAGITPTRTTPERSPKVTERRSPRSPITEKRPSRLSELESRVSQLQDELKKAKEQLSLSESRRRHTQQEAEEAKKQEQAATSKLEDLQRQLAEFSAAEESRLQELRKVSLERDRAWESELEAVKKQQSVDSAALSSALSEIQRLKQQLGATTESDAARAKQCEFAESELEGLKQEMELRLATIEGLKVNVGESDKAVAEANAVAAETKKQLEMAQATIDSLLAEGARLQECLRSKDAELGQSMARLATLEEDLKKAHNKDDVDGSFGSPDHGEAVEKVVVTIPNGNGSCGGSGAEIEQLRTALEVAEIRYQEEQTRTTIETKTAYEMLENAKSEYDRRVRDLELELKSKNDELTEAKATLAVRCDGKSDVMQPELEAKLMKSITDATELKASLMDKETALQSVMEEKRDAQVGGGEEGGGGAAEVRGGGGGAGAGQGGGAGRPDAARVRDGGGRQEQPARRQGVGAAGRGAGGQRRDGGRAAAPPGAV

SEQ ID NO: 54864 - protein, 290 aa, Oryza sativa
MAATFSAAAAAAASPTYLHRPRTLAPPASTPARLSPSSSSRRPATPSLLSLRRTHAAPPPLRAAAADPKVVNGEDFPPMKDLLRLYKKAFLDGNDEALGGIESAIIAIEKERSNSAAQYESIATEITSGKDKFLRINADLENFRKQTEKERARFTSNIQVDVVQSLLTLVDSFEKVNQEITPETDKEQTISTSYQGIYKQLVETLRSLGVGVVETVGKPFDPSIHEAIAREESHQFKAGIVSHEVKRGFLLRERLLRPATVKVSTGSGTQETSSPSTEKPVEDSKEDAAV

SEQ ID NO: 54865 - protein, 628 aa, Oryza sativa
MEGSRVDAVAGGRRWGEGEEGGRRGGGGGGGGGGGGTGGGGGGGGRRGGEDGGEVSLREWLDRPGRAVEAPECLHVFRQVAESVAIAHAQGVAVGSARPSCFVVSPPFARVAFIESASGSDVSGSCSGSDGSEEADPEPSPPRRRRDGASGGEDRGGKTFPLRSVLAMELTWYTSPEEADDRGGATFASDVYRLGVLLFELFCTFETMEEKMRAMANLRHRVLPPQLLLKWPKEASFCQLLMHPVPETRPKMSDVLQSEFLNRSRNSLEEREAALRLREEIEEQELLLDFLLQLQRRKQDIADNLQDTVAFLSSDINEAHQQSALGQCGNFSFELDKEVCSETVEDQSDCGSRKRFRPELPAVDMEEQNRSLEECSGTVPSSVLIQESVLSKSSRLMKNFKKLETAYFLTRSKLAKQVGNPVSSCHQVVKRTTGSPVVTEGSSIDDFALEGHYGTRQRGWMNSFLEGLCSYLSFSKLKVKAELKQCDLLNSSNLVCSVGFDRDKEFFATAGVNKKIKVFEYNMIVNEHCDIHYPVVEMSNRSKLSCICWNSYMKSHIASSDFEGIVQVWDVTRSQVFVEMREHERRVWSVDFSLADPTKLVSGSDDGSVKLWNMNQAILFLHLVYVSF

SEQ ID NO: 54866 - protein, 164 aa, Oryza sativa
MARTKHPAVRKSKAGPKKKLQFERSPRPSKAQRAGGGTGTSATTRSAAGTSASGTPRQQTKQRKPHRFRPGTVALREIRKFQKTTELLIPFAPFSRLVREITDFYSKDVSRWTLEALLALQEAAEYHLVDIFEVSNLCAIHAKRVTIMQKDMQLARRIGGRRPW

SEQ ID NO: 54867 - protein, 615 aa, Oryza sativa
MAAAAAAVLHALVALSLAGAVAAAGRGGEQPLSRIGIHRTTFAIQPGASVDASPLLLGLEGQDREWVTLTYNNPKPSKDDWIGVFSPANFSDSTCPSESQWVEPPLLCTAPIKFIFANYKNLDYEKTGKGSMKLQLINQREDFSFALFSGGLSNPKLIAHSKRVTFTNPKAPVYPRLAQGKSWNEMTVTWTSGYGTNEATPFVKWGLQGQIQSLSPAGTLTFSRSTMCGPPARTVGWRDPGFIHTSFLKDLWPNFKYTYRIGHRLSDGSIIWGHEYSFQAPPYPGEDSLQRVVIFGDMGKAEADGSNEFNDFEPGSLNTTYQLIKDLKNIDMVIHIGDICYANGYLSQWDQFTAQVEPIASSVPYMVGSGNHERDWPGSGSFYGNLDSGGECGVPAQNMFYVPAENREQFWYSIDYGMFRFCIANTELDWRPGTEQYKFIEHCFSSVDRQKQPWLIFLAHRVLGYSSASFYVEEGTTEEPMGRESLQPLWQKYKVDIAMYGHVHGYERTCPVYENVCVAKAASHYSGAFTATTHVVVGGGGASLADYAGVRARWSHVQDRDYGFAKLTAFNHTALLFEYVRSRDGSVHDSFTVSRDYRDILACGVDNCPTTTLAS

SEQ ID NO: 54868 - protein, 416 aa, Oryza sativa; identical to SEQ ID NO: 28567

SEQ ID NO: 54869 - protein, 810 aa, Oryza sativa
MSSAVVASSTTFLVALASSASRGGPRRGRVVGVAAPPALLYDGRAGRLALRAPPPPRPRPRRRDAGVVRRADDGENEAAVERAGEDDDEEEEFSSGAWQPPRSRRGGVGKVLKRRGTVPPVGRYGSGGDAARVRGAAAPAPAPTQDAASSKNGALLSGRDDDTPASRNGSVVTGADKPAAATPPVTITKLPAPDSPVILPSVDKPQPEFVIPDATAPAPPPPGSNPRSSAPLPKPDNSEFAEDKSAKVVESAPKPKATRSSPIPAVEEETWDFKKYFDLNEPDAAEDGDDDDDWADSDASDSEIDQDDDSGPLAGENVMNVIVVAAECSPWCKTGGLGDVAGALPKALARRGHRVMVVVPRYGDYAEAQDVGIRKYYKAAGQDLEVKYFHAFIDGVDFVFIDAPLFRHRQDDIYGGNRQEIMKRMILFCKAAVEVPWHVPCGGVPYGDGNLVFLANDWHTALLPVYLKAYYRDNGMMQYTRSVLVIHNIAYQGRGPVDEFPYMELPEHYLDHFKLYDPVGGEHANIFGAGLKMADRVVTVSPGYLWELKTTEGGWGLHDIIRENDWKMNGIVNGIDYREWNPEVDVHLQSDGYANYTVASLDSSKPRCKAALQRELGLEVRDDVPLIGFIGRLDGQKGVDIIGDAMPWIAGQDVQLVLLGSGRRDLEVMLQRFEAQHNSKVRGWVGFSVKMAHRITAGADVLVMPSRFEPCGLNQLYAMAYGTVPVVHAVGGLRDTMSAFDPFEDTGLGWTFDRAEPHKLIEALGHCLETYRKYKESWRGLQVRGMSQDLSWDHAAELYEEVLVKAKYQW

SEQ ID NO: 54870 - protein, 147 aa, Oryza sativa
MLPDLFSAAVLKVPFLDICNTMMDSTLPLTILDYEEFGDPNISTEFDTIRSYSPYDNLSPDICYPPVLVTASFNDTRVGVWEAAKWVSKVRDITCQSCSWSVILKTNMQSGHFGEGGRFMHCDETAFEYAFLMKALGLDDNDSCKIV

SEQ ID NO: 54871 - protein, 470 aa, Oryza sativa
MTLEEIAMEYIEKLVDRCLLQVARRNKLGRVWELQMHDIIRELAISISEKEGFCMIHNKAQRSVVECEPRRLSIHENSVRVQLSINASRVRSFYQFDIDCSSVSKVQWVSRTARYLKVLELGSVPIRKLPRDIGNLFNLHYLGLRRTKIKQLPESIDRLQNLRTLDIFLTEIASLPRGVTRLRMLRHLIAGKAVASYFGLEDVFTGVKVPNGLWRSLDLNVLTGISASSNLVEQLASFTQLRSLKLTDVKNIHYTKLFASIRKMQLLKNLLIGTANSDEYVSLEALDPAPQNLEILFVKGRLHDRVIGSDLFEANRLTLMELTLENSRLSIDPLPSLSNFCNLTLLGLFNHYIGETLLFQAEWFPKLHTLTLAELQNVSSIVIEKHSMPNLYNFALICLTNLEDLPEGMEFLGSVEELSLVGMHQKFMEHVQGSSNVKVKHIPVVDYFDQTKGRWDRLSPLYFEDEGTKN

SEQ ID NO: 54872 - protein, 557 aa, Oryza sativa
MKFEVVWIQFVELVWIAIHTVSTCAHSALPSLIDSISSFRKDSICYCSVMESLSHDIIISSTNITSFVELLQLRCLDINGHMVASLFRVLHTILKFLKHTDNELKEDFICISAHHILMVDWDLYYQLNVGEPLNLVKDSTFSLSDDLKQLGFLSSSLLQLLCSLLEQSDLEDNNGQDIYAKLVGVIPKLVAILPEHQDAPKSLSQYLKHKFLMIMMRLKPYIQKDCSYIVCCLKLLRQHFQDLLHEPIMQHIAKPENCLEGSPFLLSTVGLGETHDKSTRHLQRQAMYLFLSFCICLAHNGNDSALQCSCKRDDQMLGHKVLDCSDHCDCFALSEISDWFQRCFLDKIFGFKSSTDNALCFLQLYMEEDDMLFNVLLQLLDAPLISSKIDSMENRWASELIGGKLFSSIFDPVHVFHLLLLLLHYDHLVLVDYLISKDVGVHCAQYLLRCLRLVTQCWHSFTDDSIYEAKIEKLNFKRQKTFNDANSSSGSSIEGPKLGSACHKKSKNKHKLFLNAKACLLSLKRTLEDLHRKGLFPYNPKPLLKSLARFEELCEQD

SEQ ID NO: 54873 - protein, 85 aa, Oryza sativa
MSASACVDVLLMLLHRTRPSSSSNHFLDFHRACCSSMRCRSAKLAADIPVCLLVYHSVRSNPSHILPSLLLAALMCLLLMPIHIP

SEQ ID NO: 54874 - protein, 384 aa, Oryza sativa
MGLANICRAGLPSIDRALVSALVDRWRPETHTFHMPCGEITITLQDVAMILGLPIAGHAVTVNPTEPQNELVERYLGKAPPPDRPRPGLRVSWVRAEFNNCPEDADEETIKQHARAYILSLISGLLFPDASGDLYTFYPFPLIADLENIGSYSWGSATLAYLYRAMCDACRRQSDGSNLTGCLLLLQFWSWEHFPIGRPDLVKLKYPNVEELEDERDRPTVGLRWVVGVCARRAAPARCYEHFTNEFDLLTDDQVVWCPYREERMKELQLAPICTQDSHLWLTRAPLLYFFMVEIYMPERVMRQFGLHQVCPPPLRDTSAELHWCRRGRVHNDWHRSTSLLWICGKQRSKMLSWKTGHMTTAVIWIICGGTEDQHVFACAHRRG

SEQ ID NO: 54875 - protein, 479 aa, Oryza sativa
MAPFQLRFGLRMSPSRSSDEEEEDDEDEEGFEYEEILSDDGTDSPPPLMMQAEKGGGGLVGAVVGALRRSLVMCSAGKVGEEEDSEDEEEEGMEIGRPTDVRHVSHVTFDRFGGFLGLPADLEPEVPSPTPSASVNVFGVSPTSLQCSFDHKGNSVPTILLMMQRKLYEREGLKIEGIFRINAENSQEICVRKQLNSGVVPDEVDLHCLAGLIKAWFRELPTGVLDSLTPEQVMHCNTEEDCALLASMLPPVEAALLDWAINLMADVVEHENYNKMNARNIAMVFAPNMTQMADPLTALIHAVQVMNFLKTLILKTLKEREAAGTPKTTEPCSGSPNGQDKPPTPENLERPIICSDQKGIDKPMFDMATCDQLLFGPKQFLDHRENNKFEGPEKHDIGQPKRHSEASPLGNDSNNQVSSPGKEFGNRNVEGLFDKFSFRKGVERLCRHPVFQLSRSMKKSADVVVFDAPGEARQAWGLI

SEQ ID NO: 54876 - protein, 51 aa, Oryza sativa
MMSLILSFQEEVISLSLKSRRQLRFLFLGMLMVYATYILTNQLTWIWQNIL

SEQ ID NO: 54877 - protein, 157 aa, Oryza sativa; identical to SEQ ID NO: 31084

SEQ ID NO: 54878 - protein, 320 aa, Oryza sativa
MATAEQLQRRERVLRIFMNEVRSWHGFNHHHPATFDTIAMEPDLKKSIVDDLDRFLKRKEYYRRIGKAWKRGYLLHGPPGTGKSSLVAAMANYLRFNLYDLDLSEVRVNAALQRLLISMPNKSILVIEDIDCCFDANPREAHKITTAALDQAEDFDFSSSDSDDAVGAPPRARRAGDLQQQKLTLSGLLNFIDGLWSTSGEERVIVFTTNYKERLDPALLRPGRMDMHVYMGYCGWEAFKTLAHNYFLVGDHPLFPEIRQLLAGVEVTPAEVSEMLLRSEDADAALRGLVEFLRERTRRRARQEAAIDDNQVVAEKGNAA

SEQ ID NO: 54879 - protein, 313 aa, Oryza sativa
MSLYYIFCGNFHQLRNSIGSCSSTGLLKCGLIYRTVLQNRGNKTRPISTTILARSTRKESKQSFKTSRHLHSESVESSIEVLKQSDLEHLKSLQCYNIPQKVSGVKTDWPATILVFDIETTGFSRRYERIIEFAVRDLMGGKNSTIQTLINPEREIKNAYVHGISSSMVCKPDIPRFREFIPLLLQYVLSRQMADKPVLWVAHNGRSFDVPFLMYEFQRSKIEMPGDWLFVDTLPIARQLIGSDGEKLKSVSLDNLREHYKIPLAGSAHRAMQDVITLCYVLQKLTFELKLTVPQLLERSFRVSDLSIPRPGK

SEQ ID NO: 54880 - protein, 41 aa, Oryza sativa
MEKVIFWAHLLKCKLFLSKETLDWCVLARGNTHHFSLVNYT

SEQ ID NO: 54881 - protein, 693 aa, Oryza sativa
MDQSRRAVESYWRSRMVDGVTADDDKVAPVYKLEEICELLRASDASVVKEVADFVLKRLDNKSPVVKQKALRLIKYAVGKSGTDFKREMQRHSAAMRQLVHYKGHPDPLKGDSLNKAVRETANDAIAAIFSTEEPKPAVATEGLGKRIQGFGNTNFEPSRDDKKSFLSELSEVVGIGSASIKQGLSNFAASHSSMITNDNGGPYKSPNLRRSLTTEMDKYGRYDPSEIQGESRSSSGASKNVSSGSWGPSPSSSAPTDDTGSSQTGVKTREERLLDTIATSSGVRLQPTRDALQIFLTEAAKLDAVALSRALENKLNSPLWQVRMKAICVLEAIVRKQDTDPYSIITSYFCENSASVVRCCELPHVSLREKASKVLNLLVGEQPTGSNNFSETKTTVPAAQMPDLIDTGDQDDPGAQNSAQEGSERIMGNSMFTSSVDDLLGGEPIADISTTTSNGNGGDPFADVSFHETADTKDTNDLFSGMTVEEKATAALHDSSSINKNELSDIFGSSPEPFFQERVEDKGTVNDLMAGLNLNGTAQAQPGIKTESNNTVNVSQLFDMNSQTTNVANSAAMTGILGQSFYQQQQVPLQYNLPSQMLLNPAFAGQQLNYGAMSVLLAQQQQLLQNLGNFNAGLGHSSLNAMNSGNASVLPDIFNSSNQPQHVAVMSNSKKDETKAFDFVSDHLAAARGSKK

SEQ ID NO: 54882 - protein, 307 aa, Oryza sativa
MSASKLQFTPCSTPIQGNEINFSKLYLHHTPAGPRPNQSGVTSTNKETGLGSLVVNNWQVYDGIGCDAKVVAHAQGLHVYAGNWHNSFTLVFEDERFKGSTLEVMGIVVEQGEWAIVGGTGQFAMANGVIFKRFHEQKKEGNIMELTIKGFCPVLKGSPSQGLVTKIGPWGGIDGGRAQDITATPKRLESITIHSGWTIDSISFIYFDQAGEKHRAGPWGGPGGDPCTIEFGSSEFLKEVSGTFGPYEGWKVIRSIKFVTNKKTYGPFGRQEGTPFSVPVQNNSTIVGFFGRSGKYLDIVGIYVHPR

SEQ ID NO: 54883 - protein, 120 aa, Oryza sativa
MANPAQGPLRARTKPAGRRGGAPPPAAEDPSRAAAAAARRSVRKWSTWTMKTAKVAAYYGFIPLVIVIGMNSDPSPPSDSSSPRCDSASTPTRLCLRFSWALLHDRTYCVVDLQLVLFCY

SEQ ID NO: 54884 - protein, 319 aa, Oryza sativa
MDKAGGSGEAPPEPEPAAAATVKSIVVYPIKSCRGISVPQAAITSTGLRWDRPWLVMNSAGRAFTQRVEPKLALIEVEMPQEAFTEWQPTPDSHMVIRAPGLDPLKIPLGAKRATVDDVSIWEWSGSAYDEGDEAAEWFSSYFGKPTRLVRFNEASEIRETNPDYAQGYKVLFADDFPFLLASQGSVDALNSILKEPVPMNRFRPNIIVDGCHPYSEDLWKTIKIGKLTFLGVKLCDRCKVPTINQDNGIPGEEPTEALQALRSDEVLRPSHKNKRRVYFGQNLVCKESLSAKDEGRIIKVGDPVYVLESFPSSDEVPA

SEQ ID NO: 54885 - protein, 952 aa, Oryza sativa
MDWDSATPGFRARVKDLTGPLPAEREGVDVKEERLHEAVELAVDFHSALAYHVVGYVRAALGEDELALDSLRLARDLAPSDLGIAFTLAKRYAAREQFDLAVEACQRALGRGDADLVDPQLNAVFESRHLEPSKEARISTAKNGLKQLLISALSKIAIPMARDRWNGMSEETRRSFLTVGIDEMVAYCCAKPSDECQMSALTGALDFVKDNREWICWLCPQCEMTFLTAKTFQLHVEDDEFSRSQEFKESLLFVPERISDEQTEFIKCWTLPSDVNPTEEAEGEKILTKIKSTFQYLKDKKALSVDLFDNLIKFTKNRIEEAVTQNYSCITSLDPGGLLLLGTYLDLLRLRVGDAEQDSRDNFGGGVVQDACVLSIGTDENVLRITDGSSNQDALFSWLSRPSRQDPFTSWDNMRQACLDKGTHALGKLNGRAAALIEKVNLKRGLTATQTYEAYFGEKAKIDIEIMQLVAEVDNLKKNLLEVCTYDYREIILPAMKDFLWAKLCNVPPKGVSSSEGDKVSEASIENRDPVQEDINAGLNIISPESVLQEDDGKATEDNLQGGDSTVPDCNGVEELPGDSKVLQSGKKLELPPRANTSTLGSSETPMEKENKTSSPSDYSGSNEGSANISSNGVTGTAYPNSENELKSLFSALLSLWHLRPFTDKFMKKAPLYPHFGVSGKDRNCMLCYLFHSFNAFSDKSDSTATYRLSCLRPSFIKILEEANVSLKEETNLAVKYIEIVLNMVHTSETAKCISNNSKNILYKTTLFSSCPDHRCLSHELFGMHKNATESTYFLNVGASELRNIEMNTFADVIKSVDKKFHCNTESNAHNHPPCYFTTAFGYPSENDSHLVSGLLVSIAAPLDINPVYEGLHSECKYTMVSAVFRAEGRDICLAREEEKWLVYDNSLREVKEFDSWEKVLEEYSRSSFCPQIIFFERIDPVSEAAGTEVTV

SEQ ID NO: 54886 - protein, 466 aa, Oryza sativa
MALKQKGTDAAADPKKRRRVGFSGIDAGVEANECMKVFIARNPDEAGSANSTSLQPFDLNHFFGEDGKIYGYKNLKINVWISAISFHAYADISFEETSDGGKGITDLKPVLQNIFGENLVEKDEFLKTFSKECEYLSNVVTDGNVIKHDASIDEDSAVEIVRVELQGAAAFLYCRLVPLILLLVEGSTPIDITEHGWEMLLVVKKSAQASSSSNFLVLGFAAVHHFYHYPESTRLRISQILVLPPYQGEGHGLRLLETINSISESENIYDVTIEDPSDYLQYIRSSIDCLRLLTFDPIKPALCSMVSSLKDTNLSKRTSSLKMVPPSDLAETVRQKLKINKKQFLRCWEILIYLNLDAEDRKSMDNFRACIYDRIKGEILGTSTGPNGKRLVQMPSNFDEETCFAVYWTQDGGDADDQTVEQQPEDLKTQEQQLNEVVDSQMEEIVEIAKNVTSRGKDKLSVSCSV

SEQ ID NO: 54887 - protein, 471 aa, Oryza sativa
MDMAAPTVPYRTTAPPLPESGGHEDGSSGGMVLLDRWCLIADLPNASTGVGTTSTGLRIQATFHPARPPLLSRFCVHCPGLDFRRVVPKIIASDADLVLLCVPVNPDSIANARGLDYFVYRPRAHRLDLLPNPHPVYLHDSMTALLSRQDGAWYAVAALGLGPPVYKGGAPVSWDFYLHLYRSTSSSKGWTSKRLSVTEFIRDKFIPIPASVDRLYHETGKTITVGGEGGTVAWVDLWRGIFLCDVLDEFPALRDIPLPCPARSNRDLFLIQYDPSYFRDVTISRNRDSIKYIEMEMWSPKEPMNTTSTPVSYVDCVLNNTRKSQVIRDDWKATTWSMPMPVIGSSCEHWHRDCEVGVKDITLGASNPCRSNLSFSEIVEMFKELPMVNPTISMDDDVVFLLSRTSPSPMDKLHLVFAIDVRKRTLQGLTKLDVQPQNSVCMVTLCTSEICRYLRNITVTGEALNELEISS

SEQ ID NO: 54888 - protein, 217 aa, Oryza sativa
MRALNWVQTRLHGTRKQDHTAVSSRRAHTSGDLHRNGDELDDGWAAAMLSIGTLGGPKGRHGSGTPWTTAAAGADELDRLQEELRLLVRAQAVVTGGEDDDGGGGGGRQRRSLSRTSSSTNGREVVAKLKQRSIRKIMAAALGGLLHRPSCRETMPEATVSEIIWSLLHKNTHPEKPALPHTVMKGDPTVPTPQKDKQEGTKWIRTDSEYIVLDLEI

SEQ ID NO: 54889 - protein, 186 aa, Oryza sativa
MRPTRPRGCGRRTCSTCSTMIPTPGAPPATWRPSCGASRRRLLLGMSPGTLPPRRSPSSGSFSRPPTTSSACRPPPRPRRRRRPGLGSPRMPSGSADRSGGSRTRLAEAATLASPSPRRRRSPPPPPRRSGTTTASTPACSASATRSRRFATRPCRPSDGPGPKWISFFLFSSFFLNLANLSSTLV

SEQ ID NO: 54890 - protein, 370 aa, Oryza sativa
MPEEDPASAMEETAVANGGAADDVAAPDKDNDIKEKAGKGNEVAVENKNAEEQNKGGSENGTKGPSDGDVEMAEAETAKESDVKQLDTEDAKKDGAQDADANEEKNTKDTEGEDVKMAEAEAEAGNADVKDTAEKEDKDENTNTEKQELKDAKESGSEKQEELKEQDKSGSEKQEELKEQDKSGLAEYEEKKAEEESGAEKQGEEEAEEKGSADNDNEEGDKNANISDEHLKKDGGKDGNKDEAEEEEVSEADKKVEENKEETPKNKKARSARDRSQGKDKKQDGSKSREAKSLLNTASPYGTDRPQRERKTVERLVEVIEKEPNRNFVVEKGRGTPLKDIPSVAHRISRKKPADLKFLHNVLFGRKGKT

SEQ ID NO: 54891 - protein, 426 aa, Oryza sativa
MMMQLSMSLLMDTHRFQVIWFLLHLGRKTLLSNKKTIMLPHPLFTKKLNKVNSNTWFGLFDPKFGKGGASVKNEQEQQKMKGQQPAKSSKRKKRRKDDEVMMDNDQIMIPGNVYQTWLKDPSSLITKRHRINSKVNLIRSIKIRDLMDLPLVSLISSLEKSPLEFYYPKELMQLWKECTEVKSPKAPSSGGQQSSSPEQQQRNLPPQAFPTQPQVDNDREMGFHPVDFADDIEKLRGNTSGEYGRDYDAFHSDHSVTPGSPGLSRRSASSSGGSGRGFTQLDPEVQLPSGRSKRQHSSGKSFGNLDPVEEEFPFEQELRDFKMRRLSDVGPTPDLLEEIEPTQTPYEKKSNPIDQVTQSIHSYLKLHFDTPGASQSESLSQLAHGMTTAKAARLFYQACVLATHDFIKVNQLEPYGDILISRGPKM

SEQ ID NO: 54892 - protein, 470 aa, Oryza sativa
MATRRAPPPAAAAAADGSIEENAMAILDTAGIKDARDLHDDRCAFLETVRSACLAADSPSPPSWRMYNAVFQILQDSSSLELTMASLHLLMELGKQYPRAYLTDSGSGQALVAVKEAWSPFHLRSDVGCGEIGGNNRHLDHLFDSARFSSLIEDMVETANDTDANNGIEHIKNMVLLEYLVSTLEADFVPRQIAYKESLDWVIFRESLLQMLLVSRKVAFKSLVKNCISFLLNQYNQGVEDGISSKEGSAKSAPDLESSLAIISFEFERKALASVQKLFTMVMNLDLIRKEADTMGLTSRADGCRNPILDVILDELTYNISYLSPFLLIFVEWKWKLEIILQYFSKYCGKPAVRTRRSDNSQHDLTLENVLTLFSTAATTKAIVKKMSSEVVQLLLANAYQVCLHLECDSSKDSDTTKKIGATLLQISESFVSAFHNMRKINPDMQLSPFEKEALFTAASMARVLKNKQR

SEQ ID NO: 54893 - protein, 165 aa, Oryza sativa
MVMTRRRAALLVVAMCACAALPSTTTANKFSINWKPNTNYSDWPAQHGPFYKGDWLVFYYTAGQADVIQVDAAGYNTCDATNAISNYSKGRTYAFELNETKTYYFICSYGYCFGGMRLQIKTEKLPPPSPPAAAKDKSAAAFTASRASLFYAAAAAVLAAILRMF

SEQ ID NO: 54894 - protein, 221 aa, Oryza sativa
MADVFEGYERQYCEISASLARKCTAASALQGEKLKQKASEIKSGIDGAEALIKKMDLEARNQQPSVRAGLLAKLREYKSDLNNLKGTLKRVTTGNAQQGSREELLESGMAETLGVSADQKSRLLRITEKQNKTTDRIRDSHRTMLETEDLGVSLLQDLHQQRERLIHAHGTLDNVDDNIGKSRRIMGAMVRRMDRNKWIIGFIIALLVLVILVILYFKFVH

SEQ ID NO: 54895 - protein, 188 aa, Oryza sativa
MKGEAGLDRWRGKDFSSSFPLVLILEEVAAASSSSPKIGGVDFVWLLRPTAFLLSWLVGLRRRCCGMPSPDAAAGDIESALDDFARADADCIAAALACGRTSFSYRRLPEPRRLRITVRKLDDSYFDVQIARSAAVWELKAAIEDVFAALYDETDNKAISWQHVWSHFCLCFKDEKLTDDKATCVHLV

SEQ ID NO: 54896 - protein, 626 aa, Oryza sativa
MSSAVKDQLHQMSTTCDSLLLELNVIWDEVGEPDTTRDRMLLELEQECLEVYRRKVDQANRSRAQLRKAIAEGEAELAGICSAMGEPPVHVRQSNQKLHGLREELNAIVPYLEEMKKKKVERWNQFVHVIEQIKKISSEIRPADFVPFKVPVDQSDLSLRKLDELTKDLESLQKEKSDRLKQVIEHLNSLHSLCEVLGIDFKQTVYEVHPSLDEAEGSKNLSNTTIERLAAAANRLREMKIQRMQKLQDFASSMLELWNLMDTPLEEQQMFQNITCNIAASEQEITEPNTLSTDFLNYVESEVLRLEQLKASKMKDLVLKKKAELEEHRRRAHLVGEEGYAEEFSIEAIEAGAIDPSLVLEQIEAHIATVKEEAFSRKDILEKVERWQNACEEEAWLEDYNKDDNRYNAGRGAHLTLKRAEKARTLVNKIPGMVDVLRTKIAAWKNERGKEDFTYDGVSLSSMLDEYMFVRQEKEQEKKRQRDQKKLQDQLKAEQEALYGSKPSPSKPLSTKKAPRHSMGGANRRLSLGGATMQPPKTDILHSKSVRAAKKTEEIGTLSPSSRGLDIAGLPIKKLSFNASTLRETETPRKPFAQITPGNSVCRRLCALSPITLRMMRTGLRRHLQH

SEQ ID NO: 54897 - protein, 139 aa, Oryza sativa
MALWITTASTWCLSSTRCSSQSAIWAASHCHRSVPSPLSRITRLLYSSCCAAAACVITYGGSRRRSKDDVPPSSGSSSEEESSIRRPVLTSNRGALLATNSVASASSYTSTPASPPLHATTAHAYSAPARWSLAARQRP

SEQ ID NO: 54898 - protein, 789 aa, Oryza sativa
MHRKTLDQLLRFARSLDRDHRRRNRHLLDADDDDDDDPPRDHDRRTTLPIPPGLPPLHTGREGKPIISPASTKRVGPLVRPTTPRSPVPTVSAFETIEDSDDDDENIAPDAKNNAVSLLTNGTIGSDPLPGKASQNGDTKPVPSTNMIRSQSATGSLHGAQHNPVAADILRKEPEHETFSRINITAVETPSPDEIEAYKVLQKCLELREKYMFREEVAPWEKEIITDPSTPKPNPNPFYYEQQTKTEHHFEMVDGVIHVYPNKDAKERIYPVADATTFFTDMHYILRVLAAGDIRTVCYKRLNLLEQKFNLHLMVNADRELLAQKAAPHRDFYNVRKVDTHVHHSACMNQKHLLRFIKSKLRKEPDEVVIFRDGTYLTLKEVFESLDLTGYDLNVDLLDVHADKSTFHRFDKFNLKYNPCGQSRLREIFLKQDNLIQGRFLAELTKEVFSDLEASKYQMAEYRISIYGRKKSEWDQMASWIVNNELYSENVVWLIQIPRIYNVYREMGTINSFQNLLDNIFLPLFEVTVDPASHPQLHVFLQQVVGLDLVDDESKPERRPTKHMPTPEQWTNVFNPAYAYYVYYCYANLYTLNKLRESKGMTTIKLRPHCGEAGDIDHLAAAFLTSHNIAHGVNLKKSPVLQYLYYLAQIGLAMSPLSNNSLFIDYHRNPFPTFFLRGLNVSLSTDDPLQIHLTKEPLVEEYSIAASLWKLSSCDLCEIARNSVYQSGFSHRLKSHWIGRNYYKRGHDGNDIHQTNVPHIRIEFRHTIWKEEMELIHLRNVDIPEEIDR

SEQ ID NO: 54899 - protein, 714 aa, Oryza sativa
MGAAPSTPRLGAVAGAAASPGAAEQMFAALVGGKAYPISSEFWRQLLELPLTQQWPRDRVLQACHAFAQNNYHTKHLAKILIHLVWCLQECMAESSHAAYRKAINAAYISSIFLKFIIENAKTDNWQELSLEIDKDEKGLGNFPSEQSVEYFLMRGVLNYIGSVDVSLESCYLHHELLNLMLVLMSTQLCSGPSPEPKDVHPFIDAAMLQDSSIVSSVVQKLLLNFVKRPRIPLNSSHPAFSDDGGPGVLQRVGSVAANFVLLPYYTFNYLVSSNAEGASSQLADNSLLVLLILIHYRKCITMSESFPSSNVYTSDLNTNVKDAPAFHDNPYYKALSNAKDSQYDRADVEGNAQNGLVVRLSFASLFDALGTCLKDESSVLLLYSLVHGNCDFQEYVLVRTDLDTLLMPILEMLYNASRKTSNQIYMLLIVLLILSQDSTFNASVHKLVLPSVPWYHERLMHQTSLGSLMVVILIRTIKYNLSKLRDVYLHTNCLAILANMAPHVHRLSAYASQRLVSLFDMLSRKYTKLAELKNDKAIKVISDQIEADNISDDTSTELHIYTDFLRIVLEIINAILTYALPRNPEVVYAILHRQEVFQPFKNHPRFNELLENIYTVLDFFNSRMDMQQLDGEWSVDKVLEVINKNCRSWRGEGMKMFTQLRFTYEQESHPEEFFIPYAWRVVLSRGFSFNPGAINLFPVEIHVDDEPSGEQKV

SEQ ID NO: 54900 - protein, 502 aa, Oryza sativa
MADDPLSNSTTNNKRAEGIQLQHGDCESESTAPLLLAPHESYRLSAAILPFLFPALGGLLYGYDIGATSGATISLKSSTFSGTTWYNLSSLQTGLVVSGSLYGALIGSILAFNIADFLGRRRELILSSVSYLIGALLTAAAPNFPIMVVGRFFYGIGIGLAMHAAPMYIAETAPSQIRGMLISLKEFFIVLGMLLGYIAGSLFVEVVSGWRYMYATSTPLCLIMGIGMCWLPASPRWLLLCAIQGKRNIMESKENATRCLCRLRGQASPDLVSEQVDLILDELSYVDQERQAGFSEIFQGKCLKAMIIGCGLVFFQQVTGQPSVLYYAATILQSAGFSGASDATRVSVLLGLLKLIMTGVAVLVVDRLGRRPLLIGGVSGIAVSLFLLSSYYTLLKDAPYVAVIALLLYVGCYQLSFGPIGWLMISEVFPLRLRGRGLSIAVLVNFASNALVTFAFSPLEDLIGTGILFSAFGVIAVASLVFIFFIVPETKGLTLEEIEASL

SEQ ID NO: 54901 - protein, 266 aa, Oryza sativa; identical to SEQ ID NO: 32147

SEQ ID NO: 54902 - protein, 92 aa, Oryza sativa
MERVGGGEKQLEDCTVSNALGTWFFSVAGALVAIPVGIKKKSLAPLVFFGTTGTMLDIIMGISQCEREHAERQMKLLEAQNLSANASADGEN

SEQ ID NO: 54903 - protein, 477 aa, Oryza sativa
MGSVDFGLVEIHPGEIRFEFEVKKKSSCYVCLVNKSEEYVAFKVKTTSPKRYCVRPNVGVILPRATCVFTVIMQAQMIAPPDLQIRDKFLVQTTVVPFGTADEDIAPAFFSKEVGRYIEENKLRVVLVSATQLEEQQLIAGVPSAKTGVEVRVAKETLNIESEASNVMNEVHHSLKTNFPPLRENPATLNEMPFPVKQTTILAPSKEVPAISAESAHHWKETPAESLFSSNAVHHSLKTSFPPLRENPATLNEMPFPVKQTTILPPSEEVPAISAESGHHWKETPAESLFATNALPHSLKTSCLLRENPAILNEIPFPVRQTTILPPLKEVPVISAESAHHWKETLNVSLESHFSSTETNVVSSECPETLENTSPSKEFAILRDTLVNAENLHYVTDDVQNLMTKLSNLEAKLEEAESVIVKLREDTRTTIRERDKLKHEMVVLTRKGASRSQAGFPLLFVVYMAILGASLGYLLHL

SEQ ID NO: 54904 - protein, 124 aa, Oryza sativa; identical to SEQ ID NO: 29307

SEQ ID NO: 54905 - protein, 443 aa, Oryza sativa
MLSLGAIRKLCAAFDAIALTVIAAGLSRTSHHPFSAHAHYSQPDFPTIASCRAAVASSKWRRRHPSTTKESAGVEPAEPPVLVRIKNERDPVRLYELFRANAHNRLLIENRFAFEDAVARLAGARRNDLVEEILEQHKALPQGRREGFVVRIIGLYGKARMPDHALSTFREMGLYGCPRTAKSLNATMKVLLRARLFDEVLQLFESSETYGVELDDISYNTVVKMMCDLGELRAAFRVMQEMEKAGVRPDVITYTTLMDAFYKCGQREVGDGLWNLMRLRGCMPTLASYNVRIQFLVNRRRGWQANDLVRKMYASGLRPDEITYNLVIKGFFMMGEHEMAKTVFGAMHGRGCKPNAKVYQTMVHYLCERREFDLAFRLCKDSMEKNWFPSVDTINQLLKGLISISKDRNAREIMKLVIGRKPSYSNDEVKTFQDILSLGNTRR

SEQ ID NO: 54906 - protein, 447 aa, Oryza sativa; identical to SEQ ID NO: 43099

SEQ ID NO: 54907 - protein, 475 aa, Oryza sativa
MEKFLVAAPPPSGDAPAAPVPPRRHRWSRVAAELDGRIDARFRHRESVRLRDSFSEIRTFSHNYYMEGQERCTTYMNRVVNDSVLGFQAVREGISAMEFDKKGIYLASVTASGCLTVHDFETLYCSTYGPSRGLPDESSNYLLHISNSMPLCAVRWNPANQDEIVCVSRQTDMVLLFDIGCVSSTPTEILRKGRSRYPVLSEFRKGLTDVAFSSDDKSWLFASGLDGAVFMWDMRLSKKHCLELIGHPESQFSSVKLNIDNRTVFAATKEGTVHAWDLRGGRASAAFQSHNEVQQLSSVKISTLLGKIPSLKDQTNIVSSEILSIDFNPSCSYQLAFHLDNGWSGALNINTLSVSHLHCPPPDWLEHMNFMWQKLHRKPTWLPTSSIYAVGSASNTVGMHLLDFHPDTSSACHVDYNEEIRGSDEKKPAANKFIPSSQRVVSCAAHPFCHTILAGTQFSSLLVLSQKQESIKNSE

SEQ ID NO: 54908 - protein, 220 aa, Oryza sativa
MALAGAPRRRRATRSRLPPTLLLIVLLLLGGAPRASALRVPLREVATLLNLSRSLLNRVAAARAARGDDFAASRARRIASHLSLFSSRGAWALSWDYLRHYAFSSAAGCGLSCATAAARLLAAAAEVSRLHSATDAAQWLRRNYGDVRDAAAQLLNGLLVAFSEQGPLREVVMDVKWEVEEGELLKDCLKVGAKDLEGLLVIAKDLLFGATRTSSRHNEL

SEQ ID NO: 54909 - protein, 1191 aa, Oryza sativa
MNQVECQSAPHVGPASSAASLDPTEEKILYGDDNNFTGLLGEDDSSDGVPGHDNSSGNGNSSIPVSAQGGSWSALMQEALQSTSSKNGLQEEWSSVNFQNRDQAFTNKMTSPDLEQRQHATLNSMNLHSAPPSAQPSPSHDGSSGTMNNLKFTSFQRATKSVYDHQEKFSYGSTSAAINNHTTTGANDGLFQPSLKQSHSGDCGSPEHVNLSIGVWAQQKPMLLKRNLNSGGERFMPQNAQGLGVLQQSSYNHNFNGESSNNQSNWNGRNSNCVNTYSINNFQQSNPDVNTVRVPNDGYSSKNTVLTSSSTGMFSPGQHQMMLGQSGGNFGSNNAPGQRPLPETSCSQGNNAEYGLAGFSQMYTNAISAEGHNSNNGQHLGISFSARGNSFSGMDAHNLGQSDQKTMGPSALLNHLSATSGISTGHFPTNSLCNNKLLSESIQPPNNQENLLGGSCQLAGHVGSTNEKIAMVEEQLTQHSTASKYSNEPPFRGYDGTLLQNPNKIVQTSQHMLQQFLQKVDSTNSVVSSNMPIRSDITPNQLNQPPLQGFGLKLAPPMQQQLTSGNLWTSHTSVDIKPADNSVPGEDQRQLPSTPGSTTSSGYPSRSSPFYSSDADNTGLSSGCLPQTKSLGQQYPVAEPKSAPVNSLPQQSLQGTAATMLKNVWTNISAQRLGGIQHNKITPNILQSMMFPSTIGDSTLRGCPKDDYQRMRVANLSDDATTTTNSGRQEIKRVVENDGSDIPNMDQMGDILLGKKNALQRPLMQHGIINSSQGENMAANIPNMGSSFNKVSTYGGISLHGSLAPSNSQQINYSLLHQIQAIKPVDSDPENTSGKRLKTTDMSCNASQVEWPGAERAPHGENNPLRLCTDKTEVPRISNLLPSDQMLRFAPRNSEDVTSTMPSQVQLRELTSTSNDMATARTDLQNQCSSLGTSSTENLIESGDKLMINPQISPWFQHGSNRNGHNLAMYSVRKTASPYNHPKVPWSMDTSSVSGHGLECSTSVRPEMPSGLKVSSSVRRPKKRKFKAPVLVSWNQIIDGHQKLADMSTLGMDWPEATNRLIEVEDEADIQEDALILYLPRKRLIMTSRLIQQLLPSIPAAILRAQAISMYQSVTYTIAKLTVGDACSMPSNSSLDTGTLISSGDKSYEQIENDKMRDRFTKAVEFFIPRFKKMENDFVRKSGWERRGVWY

SEQ ID NO: 54910 - protein, 474 aa, Oryza sativa
MSFPSRRSSPAVTEIGLGRGITRGLTSQGLGSAPISIGPVSGNGSVSALTDLSKRNMLNTDERINSGGISQQLISPLGNKAQPQQVLRTTDTISSDSSNTNESTVLGGRIFSPPVVSGVQWRPQNTAGLQNQSEAGQFCGRPEISADQREKYLQRLQQVQQQGSLLNVSHITGISQKQFPSQQPNPLLQQFNSQSSSISSQAGIGLGQVQVPESGHTKSEEQQQSFAEDVSVESVATAGANKHMSEDDTKIPFSNPSASITEGTQLSRDPDLPAGQPLQPGMSSSGVGVIGRRSVSDLGAIGDNLSVASASTSHDLLYNLQMLEAAFHRLPQPKDSERVKNYIPKHPAVTPASFPQIQAPVVSNPAFWERMGGDSLSTDLLFFAFYYQQNTYQQFLSARELKKQSWRFHRKYNTWFQRHVEPQVTTDEYERGSYVYFDFHVIDDGTGSGWCQRIKNDFTFEYNFLEDELSVQTN

SEQ ID NO: 54911 - protein, 335 aa, Oryza sativa; identical to SEQ ID NO: 35285

SEQ ID NO: 54912 - protein, 529 aa, Oryza sativa
MDRASRSGVLSETASFADTPRSIYSSCNLQHLQSQSIRKIHEGALDISPRFSYCKPNASQDKILHRRFSLNLPEHMPGHYSRTVTERNQKAASKSITDLVVEIAALEQEVVRKELHLLSLYRKAFDQYLSESGSVTSEVDQELLKNIDEGALRLKDIKQSAAFNLPIVSDTKSEVSRSPSRHSSLVNFLSASISEYVPKISCKLSEDILSCIAAVYCKLGSVPLQDSEYITSPSPSVSSSSTFSPRNRNDSWSPRYNFDITPSPRQYGYEKENNEQKNIGMIIVPRIRIDADKFDYASKMLETIRSLIQRLEKIDPTKMTHEEQLCFWINIHNALVMHAFLAYGLHDKRMKSTDMILKAAYNVGGQSVNAQIIQNSILGCQSHRPSLWVRALFAPTKRSMAGTARHPYALQHPEPVAHFALSTGAFSDPPVRLYSAKKIHQQLEVARTEFIQANVVARRQALMLPKVLHYYAKDAALELRHVVELVCESISEAQQREIQLCLRRRIDKCVEWLPYKSSFRYVVHRDLAE

SEQ ID NO: 54913 - protein, 343 aa, Oryza sativa; identical to SEQ ID NO: 32967

SEQ ID NO: 54914 - protein, 262 aa, Oryza sativa; identical to SEQ ID NO: 31380

SEQ ID NO: 54915 - protein, 559 aa, Oryza sativa
MALHAPVLVLKDSLKRESGTKVHHANIQAAKAVADIIRTTLGPQSMLKMLLDAAGGIVVTNDGNCILRELDLAHPAAKSMIELSRTQDEEVGDGTTSVIVLAGEMLHVAQAFIDKNYHPTVICRAYTKALDDALSVLDKIAIPVDVDDRVAMLGLVKSSIGTKFTGQFGDLIADLAIDATTTAGVDLGQGIREVDIKKYIKVEKVPGGQLEDSKVLKGVMINKDVVAPGKMRRKIVNPRIILLDCPLEYKKGENQTNAELMKEEDWQVMLQMEEEYIENLCAQILKFKPDLVITEKGLSDLAVHYLGKAGVSAIRRLRKTDNNRIAKACGAVIVNRPEELQESDVGTGAGLFEVKKFGDEFFAFIVDCKDPKACTVLLRGASKDVLNEVERNLQDAMSMARNIWKNPKLLPGGGATELTVSATLKQKSSSVEGVEKWPYEAAALAFEAIPRTLLQNCGLNVIRTMTQLQGKHANGENAWVGIDGSSGDIVDMKERKIWDSYSVKAQTFKTAIEAACMLLRIDDIVSGIKKKQAPGASSAPKQPQIEQEGDADNEQMIPE

SEQ ID NO: 54916 - protein, 554 aa, Oryza sativa
MPHRPHLAQLRRLLLLPCSSVPVPVPARRLSSPRAMASSSVSAAAAAAQAGGAVAAAEYEDVMGRLSSLITQKVRAHSGNRGNQWDLMAHYLQILELEEPIARMKVIHVAGTKGKGSTCTFTEAILRSCGFSTGLFTSPHLMDVRERFRLNGVDISEEKFLKYFWWCWNKLKEKTDDDIPMPTYFRFLALLAFKIFSAEQVDVAVLEVGLGGKFDATNVVEAPVVCGIASLGYDHMEILGNTLGEIAGEKAGIFKKGVPAYTAPQPEEAMIALKQRASELGVSLQVAHPLEPHQLKDQHLGLRGEHQYVNAGLAVALASTWLEKQGHVERIPLNRTDPLPDQFISGLSNASLQGRAQIITDSQVNSGEEDKDCSLVFYLDGAHSPESMEICARWFSHVTKEDRTVPSSMVQSQSCGNSQKILLFNCMSVRDPMRLLPHLLDTSTQNGVHFEMALFVPNQSQYNKLGTNSSAPAEPEQIDLSWQLSLQRVWQKLLHGDKGMNNTNSSENSLVFESLPLAMEWLRTNARQNRSTSFQVLVTGSLHLVGDVLRLVKK

SEQ ID NO: 54917 - protein, 167 aa, Oryza sativa
MSQVGSAPAFRTGSPKKHELKSKQKLEKKLSFYTKVKDAVTSLNATKTICKKSKQRSRQKKLKAYDLSMLSEFLPETDASNLHTEAKLNCKSKQALVQREAAQLNAVLTNPQFQLDPFAAIHQHLLSTQPPSARKESNSAKQGKDPKDKKRKNKKKNASSASEAMDI

SEQ ID NO: 54918 - protein, 357 aa, Oryza sativa
MRKYRYSRTSSASSMASSRPISGKQKFQKRTLMKLGFSEMEIATHHFATRIGQGGSATFYKGVLRDGLEVAIRKHENAHPNRYDDKPEMHRLIHLCSMLEHKNIVKVLGYCDENRGVDLSNENTPKEVVGAKEEFLLLVEEYMANGNLSNFIYGEQLDWSSRFQIIQGITLGIIYLHTHSGKPTIVHLDLKPDNILLDSDMNPKIGDFGLAKVLEDDEINASVRGTLGYMPPEYIVEGVISVKNDVYGFGVTLLETISGMSKSGRDTRHQASIEWAWGKRNSGVMNKLFDPSLCDNSQLKEIKRCIEIGLLCTQKELTDRPTMPDVLQMLQGTKKVPTPKQPGYIKRVREAERYKQV

SEQ ID NO: 54919 - protein, 38 aa, Oryza sativa
MEVVDEKSPKTLREPSKTFVAPAPATSTPPPPTPTQEE

SEQ ID NO: 54920 - protein, 279 aa, Oryza sativa
MDLKDSLSKFKQQQERCQSSLASIAASTSKPKHRAQPVNAPSAPARPLQPIKFSNDTERLQHINSVRKSPIGAQIKLVIELLYKTRQAFTAEQINETTYVDIHGNKSVFDSLRNNPKVHYDGRRFSYKSKHDLKGKDQLLVLVRKYPEGLAVVEVKDAYPTVMEDLQALKAAGEVWLLSNMDSQEDIVYPNDPKAKIKVDDDLKQLFREMELLRDMVDIEKELQKNGIKPMTNTAKRRAAAQINGVQPKAKPKKKQREITRRTKLTNAHLPELFQNLNT

SEQ ID NO: 54921 - protein, 412 aa, Oryza sativa
MGQKLNERLQESHGDEVLKAEASAKVHKFTEWALKCIGLHSRVRENKGRGNHGTIIEVQLQLSAFKTFLDLADNDLTGKDFTEAFDAACFPLTLFSNTFDQGWASGISAAAIQGLLELLVEGGADNVNQCFLEAARYGSTELVRILLQIARRNSLDIDVDLALGFAAHYGKLDTMGCLVEEGNAVAFLGPLMRAAERGCLQVVEWFVNLGCRDMELCLALTAATSSSQVAVAAYLLPLVPKHVLAPLSVEILKAAGERSTGSLHGVDFLLRSNFLNDPAATYAVADNIAKSADEAVDAKLRSFMLEHWSEAAFSEGFASAQEHFVNFMRIMEKGESPICLRDLPLELVIAMAYLPLYRECVESGGRLLPQKLRGQLVEAAGRLEGRQLDRASQGTELLAILEHHLPCFMIQT

SEQ ID NO: 54922 - protein, 125 aa, Oryza sativa; identical to SEQ ID NO: 54099

SEQ ID NO: 54923 - protein, 344 aa, Oryza sativa
MVRKLILALAVFLPALVYQQLQPPPPKICGSPGGPPVTGTRTQLKDGRHLAYLESGVPKDQAKYKIIFVHGFDSCRYDALPISPELAQELGIYQLSFDRPGYAESDPNPASTEKSIALDVEELADNLQLGPKFYLMGFSMGGEIMWSCLKHISHRLAGVAILGPVGNYWWSGLPSNVSWHAWNQQLPQDKWAVWVSHHLPWLTYWWNSQKLFPASSVIAYNPALLSEEDKLIMPKFAFRTYMPQIRQQGEYSCLHRDMTVGFGKWSWSPLELEDPFAGGKGKVHLWHGAEDLIVPVSLSRYLSEKLPWVVYHELPKSGHMFPLADGMADTIVKSLLLGDQPPQA

SEQ ID NO: 54924 - protein, 120 aa, Oryza sativa
MMNNPQPWRSTIITIRYTLFYERKGACAPICAPLRCIVATTVRRGQDKRGANSRGWSRCAHLQRIVRMHVLMDMLTDLMEICLCGYMVCGAFGLLDLSYRDVSVDMWFEVLWSSWSCFSN

SEQ ID NO: 54925 - protein, 349 aa, Oryza sativa; identical to SEQ ID NO: 51841

SEQ ID NO: 54926 - protein, 543 aa, Oryza sativa
MPNVRSSPVADLPGWPLFSPPKLQLQKCTKCPREFCSSINYRRHTRVHRRTLQIEKDFLKNRDNIAAFWDKLTLDQAKTILSLADVDIEGVTGPSILAALSTWMCKPGYASLPLPYARAGNQLLDLIETTASRLPVSSNELFSMLDEASENTFLSTNPTACIQKFIFNGEADKVAPELKNAVACTSYMLEQTLVEAWSADKAAEALRCQKLLVEEEEAAQKRQAELIERKRMKKLRQKEQRLKDLKDEDVTDRFPGSVDGTTDSSGILSLKEATSDPGLYEQEDTQLPTPVASEDNSSFADLPVEHDIHDPGHEVNPSVTLNQQVFSRHRVGRTENFAQNSFASGGSAIGSKHPASVRHSHYRGANAGAVSNRNKTWTWKVRTEIEEHSPKDELNIDDGQEIVLNKKSRVLIGSISVAIEDGSECLEDNQYSKEYPTPASQLNIGNHPVTKVMQPFNHGEEGNGYNAHNDVEVSITPTAQDHSSSGVMTDGNNCSSCCNAGLAEGGGLRGAIFSSKEAAAFLSQRWKEAINADHVKLVLCPEG

SEQ ID NO: 54927 - protein, 258 aa, Oryza sativa; identical to SEQ ID NO: 28735

SEQ ID NO: 54928 - protein, 105 aa, Oryza sativa
MVRWLKVGGYIFFRESCFHQSGDSKRKVNPTHYREPRFYTKVSMLTILFLVPFYHLNLKLDSSRFSTRLASLNVTHFTESKLYTQYAYSSTEQCYLRYFVTSCDD

SEQ ID NO: 54929 - protein, 460 aa, Oryza sativa
MSNLGQSPGLNNGPVPLYPSGTDKNSGETWYEVGRTLTYTPTADDIGHVLRFECVSVDAEKKVPVGPPTSIMTSRVIPAPTPTPRRLIQVNGDVLSHLDLDSQTSFGTFSVLSYNILADAYATSDAYSYCPTWALSWTYRRQNLMREIIGYHADIICLQEVQLNHFEDFFSPELDKHGYQALYKKRTTEVYTGAPHAIDGCATFFRRDKFSHVKKYEVEFNKAAQSLTDAIIPSTQRRVALSRLIKDNVALIAVLEAKFGNHGTDNPGKRQLLCVANTHVNVHQDLKDVKLWEVQTLLKGLEKIAVSADIPMLVCGDFNSVPGSSPHGLLAMGKVDQLHPDLAIDPLGILRPASKLTHQLPLVSAYSSFARMVGVGYDLEHQRRRMDPATNEPLFTNCTRDFTGTVDYIFYTADSLSVESLLELLDEESLRKDTALPSPEWSSDHIALLAEFRCKPRIRR

SEQ ID NO: 54930 - protein, 173 aa, Oryza sativa
MAGVGRTMIAPLLVLNLIMYLIVIGFASWNLNHYINGETNHPGVAGNGATFYFLVFAILAGVVGAASKLAGVHHVRSWGAHSLAAGAASALIAWAITALAFGLACKEIHIGGYRGWRLRVLEAFVIILAFTQLLYVAMLHGGLFSGNHAAGAGGYGGDYPADHHHKPAAAARV

SEQ ID NO: 54931 - protein, 506 aa, Oryza sativa
MERDAWLLCAALAAATVVYYLACTTSRRAQRRRLPPGPTPLPVIGNVLSLRGNMHHALARLARERYGPVMALKLGLVTAVVVSSPDAAREAFTKHDRRLAARAVPDTSRVRGFADRSMIWLPSSDTRWKTLRGVVATHVFSPRSIAAARGVRERKVRDIVGYFAAHVGEVVDVGEAVYSGVVNLVSNAFFSGDVVDVGEESAHGLREAVEDIILAIAKPNVSDLFPFLRPLDLQGWRRWAEKRYDTVFDILDNITNSRLADASAGNHAGDFLDSLLGLMSYGKIARDDVTTIMFDVFGAGTDTIAITVQWAMAELLRNPSIMAKARTEMEDVLAGKKTIEENDTEKLPYLRAVIKEAMRLHPVAPILLPHQAAEDGVEIGGYAVPKGSTVIFNVWAIMRDPTAWERPDEFMPERFLQRAEVDFRGKDFEFMPFGAGRRLCPGLPMAERVVPFILASLLHAFEWRLPDGMSAEELDVSEKFTTANVLTVPLKAVPILASSASELQAS

SEQ ID NO: 54932 - protein, 262 aa, Oryza sativa
MWCFWAGRLRLPDKDGWWWLQELLLLMLVGGLNELLQLVSWLNLHMLLLVEALGGKLVGWLLRLLLIEALCGNIFPSISGVAYLRQIVTRQGFSRRHPNSCMFKASWSMETFFKSTCSSIQVEGSIRVEYRPSSRLLSIGLQSVLLRFDGELLDNILLSPVKLKKNLRLNNKPRIAPFPWRQPKGSPVCQAVCASSVEARGRGRRGITAVPCRSRSLLLFGLSWRMFFLVQLALPSEWMVLFFMSYLLWRCSGDAISFELCL

SEQ ID NO: 54933 - protein, 580 aa, Oryza sativa
MGCSKTQTQEDSEFNQCNEERSLCLHSFSDLSHVSAATFMYLLKDCYLYGTDKATPKFKILQLQVKRVLNNDPQPGPFTYVVQCMYIVPLLGKTHAEGFSHMLISSLRHLKSVESVQKDFLDAKHLAARLILDIVASIVPHEERILIKLLEAYDIELRDMADALYGSELGDEDLVKAKEHLKQYVQCLMESESYVTAVNLITRFSIQCYDESFLTKLIENNHLEAAEKWAVFMGNEMICLIIQTYLDIKMLKRANELVKQHDLTEKFPDVNYLYKESVLKKLAEKGCWDIAEVRAKKETKLMEYLVYLAMEAGYMEKVEELCQRYSLEGYVNSLGNHKHQRYLSYINICSPAVPEEICCGSDYLDLKELILEDIIWVDEIDGLLNSISYIEACKIIGVDCEWKPNFEKGSKPNKVSIIQIASDKKAFIFDLIKLYEDDPKVLDSCFRRIMCSSNILKLGYNLQCDLHQLSQSYGELKCFQSYEMLLDIQKLFKGTTGGLSGLSKKILGAGLNKTRRNSNWEQRPLTQNQKEYAALDAVVLVHIFHHVKGQPQFGVTEGCKVEWKSHIVSRVKNSRSTLRF

SEQ ID NO: 54934 - protein, 636 aa, Oryza sativa; identical to SEQ ID NO: 35318

SEQ ID NO: 54935 - protein, 726 aa, Oryza sativa
MNLRRLWEVWGEWEIRVLVLSSLSLQVFLLFTGGLRKRKAAWWLRMPLWLAYLLADYIAIYALGNLSKKQKLCDGSFDGEMHLLVFWAPFLILHLGGQDTITAFAVEDNELWLRHFLSLLSQVALAGYVYWKSRPSMRLMSPAIIMFVAGVTKYGERTLALRAASMDCLRSSMVTQPDPGPNYAKFVEECQSRTESGLVAKIVIVQERPPDDEDHVEVKREEYGDLVYSAHRFFHTFRRLFVDLILSFQDRIDSLAFFRRLEMEQAYKVVEIELVLMYECLHSKALVIHGLLGRSLRLFSLAAPVVSLVLFTRALGDMREGYNQVDINISFVLLGGAIFLETYAILLIFISSWTYTDMRGREALRPVAAAVFWLIALFQPEKRPRWSNKISQYNLISYCVKDKSRRYKKPMEWLEWRWNFRVKTMWDSWRYKTSIGVSELLKSHIFEQLKSKASSISKDPKSYRKAGEHRGQWALQRKGLYQKLGWSVDCEFDESILLWHIATDLCFYANHPADKDDDGCCSCSSSSKCLRCLCSSSSGYPDAEARGRDSNKLATMSREISNYMLFLLVMRPFMMTASIGQIRFGDTCSEAKNFFRRDDEEIGDEERCAKRLTKVDTSIAEPRDVKGDRSKSVLFQACKLVRQLNELEGITEERRWRLIAGVWVEMLCYAAGKCSGNAHARQLSQGGEMLTVVWLLMAHFGMGDQYRVESGHARAKLIVHHNHSTM

SEQ ID NO: 54936 - protein, 418 aa, Oryza sativa; identical to SEQ ID NO: 28857

SEQ ID NO: 54937 - protein, 673 aa, Oryza sativa
MPLLRGGLVSVVLLLLASPFFFSANPAATAVGDCPLDFSWANFTLASAACSDPTQRAACCRYINAFVAISMARYANATGRLGVPPAFSEICLSSVSETFKLRGIPTDADVFCGLGPKIRVSYQCAGRDTVLEMLQSPNFNDVVGSCRGPLSLDITCKTCLNYGIVYLHRLIGSDDNVGLSVCRNAVFVTLATQQGIFSYDDIVKCFFGVQGITIFPGPSSVTSTPASSPNVTTPVDAPAPKTKTVLQKHHQPYRITVIPGIGIAVILLAVLLQLVLVILIRRKNRELKNADLHAQNPENAFCQSQSWRCPEGQSPMFQRYSYKETMKATNNFSTVIGKGGFGTVYKAQFSDGSIAAVKRMDKVSRQAEEEFCREMELLARLHHRHLVTLKGFCIERKERFLVYEYMANGSLKDHLHSSGRKALSWQSRLQIAMDVANALEYLHFFCNPPLCHRDIKSSNILLDENFVAKVADFGLAHASRTGAISFEAVNTDIRGTPGYMDPEYVITQELTEKSDIYSYGVLLLELVTGRRAIQDSRNLVEWAQGHLSSGKITREFVDPTIRGLVDMDQLHLVVSIVQWCTQREGRERPSIRQVLRMLSERLDPGNGSFGEGMEDAEGGFYPRNSKCGVHRNELIPHSGDMRSLHSSSSTTRSYCSRSMLLECGQAHSPPETL

SEQ ID NO: 54938 - protein, 191 aa, Oryza sativa; identical to SEQ ID NO: 32615

SEQ ID NO: 54939 - protein, 205 aa, Oryza sativa
MAPPPPPVQEQEEAEQQQAPGEPKLPLFLARGLGIDRIASGLFTAGGGGDGDGGNGGAGRMSAVEEEHAEKVAALDAQYKRMMDEQPGDALFLRNYAQFLHEVKGDARRAEEYYSRAMLADPSDGEIMSQYAKLVWEVHRDLDRSLTYFHKSVQAAPHNSNVLAAYASFLWEQDDDDNDDLGEGEQDVAVAAQPGHVRQLASVAV

SEQ ID NO: 54940 - protein, 579 aa, Oryza sativa
MATLPLATGVGWVVSPVIKLMFEKVQSYISTQYKWQSNLVDDLKKLETILTEILLVVGTAERRRTLDCNQQALLRQLKDAVYDAEDIMDEFDYMFLKANAQKRKLRSLGSSSISIAKRLVGHDKFRSKLGKMLKSLSTVKECAHMLVRVMGVENFSSHMLPEPLQWRISSSISIGEFVVGRQKEREELVHQLLEQSDKPESRSKGARSTSLEVITIVGNGGIGKTTLAQLIYNDKRIEDNFDMRAWVCVSHVFDKVRITKEILTTIDKSIDLTNFNFSMLQEELKNKITMKKFLLVLDDVWYDEKVGVPINADRWRELFAPLWHGAKVIKILVTTRMGIVANTLGCATPFCLSGLESKDSWELFRRCAFSTRDPNEHLELKSIGEHIVQKLNGSALAIKAVGGHLSSNFNYEEWNRVLKSGLSNEKDIMTILRLSYECLPEHLQQCFSFCGLFPKGYYFEPDMLVNMWIAHEFIQDRGRTYGSLTSTGKSYFDELLSRSFFQALRYGGTVHYVMHDLMNDLAVHVSNGKCYRVEANEPQEIFPEVQHLSILAERVDLLRACKLQRLRTLIIWNKERCYC

SEQ ID NO: 54941 - protein, 470 aa, Oryza sativa
MAPVETLDPAPEFVKKVVKFARETGDLQTLSDVDIKIIALAYMLEAEIHGTNHLREQPPPLRVVNVRNLKEAPLPGWGSNVQNLAEWEELDQMSEAGGDLKSRILPLKDLENHEIPNSETNSISDKQGDEEHQPAKKDVGIAWEDDENNEGWLPAVSRSTHRRYLRRKARRDALKESEQSIETSSAAPSIDDDKILSENGLNPVDGPSADTDVMEHQEVNEPEIVADHSQSDNKDNGVGNVGDVEETGGTDACIEELDNLDIKSDSEEGVDSSLADDGSSEQSWALRSLSESTVACITSGYAMQNVILQIGLRLLAPGGMQIRQLHRWVLRCHACCKVTQEIGKIFCPKCGNGGTLRKVSVTVGENGITMASRRPRVTLRGTKFSLPMPQGGRDAITKNPILREDQLPQKVLHPKSKKSNKQDDDFLGVEDIFSHSGEKKVPLKPPVRKALAMFSGKRNPNDNHFSRKKH

SEQ ID NO: 54942 - protein, 398 aa, Oryza sativa
MQVFYPQFLTSSIFPSYSLFYEYDTPWILGKNTKTSMDFSKCEDLGKDYLIMLKISTKVLQSMFCQFCGQNQPFFQTKKDYFQQFAKSPIKKMLEIALSFSESNWSEEHIRPMLLAYDTLQDVLPTIRELSPDEPDEFFTSILHNMRNASRGIIDNMKRFIQHKVQTWDNIAIHPTTCFLINAIKIFNVHKNLLHSTLVPGDGQDSFGYLINGVIACWKLKIKELSMLDDPDKNDSDGNNPNLFIFLLNNIKHFNRDTNGLLDGLLVHRELIEECKNEFQSDMENYTSRYMTASWGPAISCLNNHTGGSIRQSMNAFISKFEGTFDCQKVLKVPDSELKQNLRDDIENLIFPAYEISFEELQRNSNSGLFCSCFPRNLTCSMYTPEILRRSVQGLFEG

SEQ ID NO: 54943 - protein, 491 aa, Oryza sativa
MAAAAREEQPLLLRREEGEEEGEEVGWRRRWGSEAGKLAYLALPMVAVSLTNYAVQVFSNMMVGHLPGVLPLSSAAIATSLASVTGFSLLIGMASALETLCGQAYGAKQYHTLGVHTYRAILTLLVVCIPLSLLWVFMGKILVLIGQDPLISHGAGRYIVWLIPGLFANALIQPITKFLQSQSLIMPMLVASVATLVFHIPLCWLMVFKTGLGYTGAALSISISYWLNVAMLVAYILLSSSCKETRTPPTIEAFKGLDGFLRLALPSALMICLEWWSFELLILMSGLLPNPELQTSVLSICLTSITLLFTIPYGLGAGGSTRVANELGAGNPEGARSAVYVVLSVAVTEALIVCGTLLASRRLLGRAYSSEEEVISFVAMMVPLVCITVVTDGLQGVMSGIARGCGWQHLGAYVNLGSFYLLGIPMAILLGFVLHMGAKGLWMGIVCGSISQITLLSAITFFTNWQKMAENARERVFSEKPTEPSRYHLVE

SEQ ID NO: 54944 - protein, 404 aa, Oryza sativa
MSPMMATLQDVTAVLHSPSASPPSGLRAPAAVGMGMARTRFLAPRAAASAASAVSAKPAAVAPLYADRTVVRIGLPSKGRMSEQTLSLLKSCQLSVRHLNPRQYTADIPQVPNLEVWFQRPKDIVRKLQSGDLDLGIVGFDIVSEYGQGSDDLVVVHDALEFGHCRLSLAVPKEGIFENINTLEDLANMPEWTQERPLRVVTGFGYLGEKFMRENGFNHVSFLAGDGALESYPAMGMADVIVDLVSSGTTLRENNLKEIDGGVVLESQATLVACRRSLHKRNGVLEITHEMLERLEAHLTATGEIMVTANMRGNSAEEVAERVLSQTSLCGLQGPTISPVYRSRDGKVAVEYYAINVVVPQKSLYKSIQQLRSIGGSGVLVTKLTYIFDEETPRWRKLLSELGL

SEQ ID NO: 54945 - protein, 164 aa, Oryza sativa
MRLFSKKTKDMWWFTEGVSDNCPTVDVHPATILEGSSHRDGSIYKFCPGFIQVFQIADRHETCLEPMMLSQPMDCQPNRDTCTVHFSTRMMQIFSIKLAKIHMYSGPVQIYGYIAVRDHLDSMLNYVVNRSRDDPIIVKQGSCIEMIGPKRGISMSCSVVLSLT

SEQ ID NO: 54946 - protein, 183 aa, Oryza sativa
MAAPPATASAPSLRPSAASPRAAAARSVAVPSGPRTVGPRRDGGRFLGVRAAKAVSGVQSGTVVDDGVQRPWKLSDARLVLEDGSVWKAKSFGASGTQVGEVVFNTSLTGYQEILTDPSYAGQFVLMTNPHIGNTGVNPDDEESNRCFLAGLIIRNLSICTSNWRCTETLEAVSDEQKHYGNI

SEQ ID NO: 54947 - protein, 166 aa, Oryza sativa
MGGGYTVVLIHNPYCQLSFARAGDDKWTWLPPYSDYEDCFFKDGLLYAATLLGEIHMFDLTDPKVAPKIVMGKVKDFLYENIYIVEASCGNLLQIWRSDDLPKWDVPEGDEDDDHSFDSESEFDSESYVCDTNTIKVHKVSLTEGKIVEISSLDENLLFLGHGQTL

SEQ ID NO: 54948 - protein, 235 aa, Oryza sativa
MATVSDDYAQIDISTEEKDKLVAEVMRHVLFKTHQTAGCPIKREELTQIVTKNYRQRVLPALVIKEAGDRLAATFGYEMRELQRTRAPSTRSGRPSQQQVNVDAKSYVLVSKLDPEVYSKYVEHKEAAHVSGFAFVVISIVHLSGGKISEEDLWHQLRRLGLNESDENHPVLGNNKQALELLVQQRYLLKEKLSGPEGHSMMYELAERALDESISGKLKDYISQVVSTSTAAEVD

SEQ ID NO: 54949 - protein, 555 aa, Oryza sativa
MARTMGSTPTYCSYQTNGVGALKQSPHMQFQQSYNYGVRFLKRDTLSVRINKHMAKRIATSTGICTKPRRSHMPIVCSAGMTIIFIATECHPWCKTGGLGDVLGGLPPALAAMGHRVMTIVPRYDQYKDAWDTNVLVEVNIGDRTETVRFFHCYKRGVDRVFVDHPMFLEKVWGKTGPKLYGPTTGDDYRDNQLRFCLLCLAALEAPRVLNLNNSEYFSGPYGENVVFVANDWHTGVLSCYLKSIYQAKGMYVNAKVAFCIHNIAYQGRFAREDFELLNLPDSFLPSFDFIDGHFKPVVGRKINWMKAGITECDLVMTVSPHYVKELASGPDKGVELDGILRTKPLETGIVNGMDVYEWNPATDQYISVKYDATTVTEARALNKEMLQAEVGLPVDSSIPLIVFVGRLEEQKGSDILIAAIPEFVEGNVQIIVLGTGKKKMEEELILLEVKYPNNARGIAKFNVPLAHMMFAGADFIIVPSRFEPCGLIQLQGMRYGVVPICSSTGGLVDTVKEGVTGFHMGLFNVECETVDPVDVTAVASTVKRALKQYNTPAF

SEQ ID NO: 54950 - protein, 104 aa, Oryza sativa
MSSRRGGESDGGDSPRRREEAKSTTPRLQPGAAGGRSVAPSAEMSSRGWGESGGDDSLRLQGDSSSRKMAKSRPDNIAAARLSQRACCGVLRRRRGDRLGVQQG

SEQ ID NO: 54951 - protein, 714 aa, Oryza sativa
MDSGGGGGGGALRPSALDLVAALLTGRGRPEEEGWPPSLAENRHLIVLLTTSLVVLVGCGVALLVRRSSISAPAVRAQEPQPRAPAPAKRKQEAEPDPDDGRQRVAVFFGTQTGTAEGFAKALAEEAKSRYDKAVFKVLDLDEYAADDEEYEQKLKKEIIALFFVATYGDGEPTDNAARFYKWFGEGNERGEWLSNLRFGVFGLGNRQYEHFNKVGKVVDQLLAEQGGKRIVPLGLGDDDQCIEDDFNAWKELLWPELDKLLRVEDDKSAAPTPYTAAIPEYRVVLVKPEEAMHINKSFSLSNGHAVYDIQHPCRANVAVRRELHTPASYRSCIHLEFDISGTGLTYETGDHVGVYAENCTETVEEVENLLGYSPDTLFSIHADQEDGTPLFGGSLPPPFPSPCTVGTALARYADLLSFPKKSALIALASHASDPKDAERLRHLASPAGKKEYSQWIVSSQRSLLEVMTEFPSAKPPLGVFFAAIAPRLQPRYYSISSSPRMTPTRIHVTCALVYGQTPTGRIHKGVCSTWMKNSIPLEESQECSWAPIFVRQSNFKLPTDPTVPIIMIGPGTGLAPFRGFLQERLALKETGVELGHAVLFFGCRNRKMDFIYEDELNNFVETGALSELIVAFSREGPSKEYVQHKMAEKAPEIWSIISQGGYIYVCGDAKGMARDVHRTLHTIVQEQGSLDNSNTESYVKSLQMEGRYLRDVW

SEQ ID NO: 54952 - protein, 76 aa, Oryza sativa
MTVIDGAVAADAGGAAAAVVQPGNGQTVCVTGAAGYIASWLVKLLLEKGYTVKGTVRNPGMHTHGRHKLLQLVRFS

SEQ ID NO: 54953 - protein, 589 aa, Oryza sativa
MDSSASASASPTAAAAADADRYTYSPRLRWQPEVEEYFAAAYGRDRFARISEALAHPSCYSCIRVNTLKSSTDAVMHKLMNLVDQNGLCGGINGLEIGQQNGGEQAHEGNSVVHKCPYSGLDNVLFVQGSGPHALHYNSQPDQSIKEVIVSRKCAESVLRGAQVYIPGVLACSSHVEKGDKVAVSVAIEQPAEDGGWTVGITRGTVLQGLQSDAHHEERKGLYIGQGITAMSRSGIFRVPHGVAVEMTERVYKLPSFNDVLEGEIFLQNLPSVVAARVLDPQPGERILDMCAAPGGKTTAIAILMKDQGEIIALDRSHNKVMDILKLAAEMDLNCIKAYKLDALKSVRKTNEAKYIGEAGSRTDAIVTLAEDSEPCINKVDAGTTNASEDSSTTSVVQTDNKKTDDKRYVSKADLRKNLRRMRNGPGRNNCSGGRVENSKGFLPNSFDRVLLDAPCSALGLRPRLFAGEETLESLRNHATYQRRMFDQAVKLVHPGGVIVYSTCTINPGENEALVRYALDKYKFLSLGSQHPKVGGPGIVGSFERSTKKYTEEWLTKHESQLVQRFDPSSTLDTIGFFIAKFDVGQKDD

SEQ ID NO: 54954 - protein, 517 aa, Oryza sativa
MGIFKLNLLLKLQRQRQRRRRQIQARNGSVLIHPRDKINAPACQNNTHSWSGQAKCSDPTLLEDVSCHIHSLMSMRDAARVACVSRAFARSWRCLPNLDFSEGSLGINRSTCKKDEKLGDLTSKIDWILKNHSGIGIKKLIIQVGSVYSRDSSHLAHLDSWLQCAVKPGIEELIVNLSSMNAKCNFPCELLSSGTGDSLRYIYLASCNFHPTVRIGCLKSLTRLQLCMVNITENELRCLLSISLGLERLELRHCSTLKCLKVPCLQRLSYLDVMTCTGLQVIESKAPNLSSIRFEGDLYVQLSLGEPLQIKQLYRLCNDAAFYARTELPSSMPNLERLIIHSDTEMVNTPMVPSKFYHLKYLSIALGGQTYDYLSLVSFFDASPFLETFILNALRERTERATIFGDPSGLRMMPEHRHDKLKCVKIINFSSVKTLVELTCHIVESATALECLTLDTTSGSPRCSVNRLGKCFLMRRETLMEAHRALKAVQTYIELKVPSKVELNVLEPCSRCHALDL

SEQ ID NO: 54955 - protein, 263 aa, Oryza sativa
MDVRFGPEEQIVWPASVLAGILMCAAVYDITREVSSRCYKGYNGLNELHKLEWNNRGFSTFHALVAAVVSFYLLVISDLFSKDVHGAIIIDRKSWMSDAMFGVSLGYFLTDLLMILWHFPSLGGKEYLLHHGLSMYAISLALLSGKGHVYILMVLITEATTPFVNLRWYLDLAGRKDSKLYLYNGVALFAGWLVARVILFVYFFAHVYLHFDQVRTVFPLGFYSMMAVPPAMSAMNLLWFRKICKGMVKAMSSANRSQCVKTD

SEQ ID NO: 54956 - protein, 496 aa, Oryza sativa
MPEKAVDDVMDSAVGAHFSGLRLEALRLSSPSAPSSPSSAKAAAAAAAHSNGAVYANGVAADAAELVSPSALRQPFVIGVSGGTASGKTTVCDMIIQQLHDHRVVLVNQDSFYRGLTAEESAHAQDYNFDHPDAFDTEQLLECMGQLKRAQPVNVPIYDFKNHRRSSESFRKVNASDVIILEGILVFHDQRVRNLMDMKIFVDTDADIRLARRIRRDTVERGRDVSSVLEQYGRFVKPAFDDFVLPSKKYADVIIPRGGDNHVAIDLIVQHIRTKLGQHDLCKIYPHVYVVQTTFQIRGMHTLIRDRDITTPDFVFYSDRLIRLVVEHGLGHLPFTEKQIITPTGSIYMGVEFCKKLCGVSIVRSGESMENALRACCKGIKIGKILIHRVGDNGQQLIYHKLPMDIAERHVLLLDPVLGTGNSANQAIELLIRKGVPEERIIFLNLISAPEGIQCVCKRFPRLKIVTSEIDTGLSEEYRVIPGLGEYGDRYFGTDN

SEQ ID NO: 54957 - protein, 624 aa, Oryza sativa
MDLDPEGLFRDDSDEDDDNVQEREANKEMVVYLIDASPKMFTPATKADEKEETHFHTIVNCITHALKTQIIGRSYDEVAICFFNTKEKKNLQELAGVYVYNVTEREPLDRPDARLIKEFSCIEDSFMSNIGSRYGITSGSRENTLYNALWVAQALLRKGSVKTVSKRIVIFTNEDDPFGGLTGAVKTDMIRTTIQRARDAQDLGLSIELLPLSRPDEEFNMSLFYADLIGLEGDEIVDYLPSSGEKLEDMTNQLKKRMMKKRKVKTLAFAITNDVCIEVNTYALIRSTTPGAITWLDSISNLPLKAERSFICNDTGALIQDPQKRFQVYNDKIVKFSTRELSDVKRVSSHHLRLLGFKPLDYLKDYHNLRPSTFIYPSDEQIFGSTRVFVALHSSMRRLGRFALAFYGNPTRPQLVALIAQEEVTSAGGQIEPPGIHMIYLPYSDDVRYPEEVHLTSDDAPRATDEQIKKASNLLRRIDLKNFSVCQFSNPALQRHYGILEALALGEDEMPDVKDETLPDEEGLARPVVVKAVEEFKASVYGENYDQEEAEAAAAKAGASKKRKALTDAAAEKSAAHNWAELADTGKLKDMTVVDLKSYLSAHGLPVSGKKEALVSRILTHLGK

SEQ ID NO: 54958 - protein, 639 aa, Oryza sativa
MLGRAGALSAARWRGGAGTGTGIGIDLRAALRSGGNLLFALFVAAVLAFTLLAAVHSPDDPLLHPSSHQLTAFLTSATSNSTFLADDSVLRTGEDFAAAIGANSSDAAAAAEATVVAEAVPFIKLEDVATKEESSGAERAVTVDTDASSDAGAAAEENPIVEAVSCDTEAPVDCTGDKDLFNLLMRTAIEKFSDLHFYRFGRPVAVPGSPMECDLAWRFRPAEDTNGRTTYYKDYRRFTLTRDVNTCNLVVGNVGEYHSGTGAKRSGRRKGKKGKKGKREAPVTDFVPAKTQMRLDENAANADTTAASEPELVVGEAVNDNLPVVESESEFSRGKYLIYMGGGERCKSMNHYVWGFLCTLGEAQYLNRTLVMDLNVCLNSRYTSSGKDEERDFRLYFDFEHLKQSASVIDQSQFWTDWGKWHKKDRLKNHYTEDIKVTPMQLRDVKDTLIMRKFGNVEPDNFWSRVCEGETEAVIKRPWYLLWKSRRLMEIVSAISSRMDWDFDSVHVVRGEKAQNKQLWPNLDRDTSPDSLLTTLNDKVGAGRHLYIATNEPDKSFFDPMKGKYRTHFLDDFKDLWDENSEWYTETKELSNGNAVEFDGYMRVAVDTEVFLRGKRKLETFSDLTRDCKNGVNTCPASS

SEQ ID NO: 54959 - protein, 573 aa, Oryza sativa; identical to SEQ ID NO: 45006

SEQ ID NO: 54960 - protein, 453 aa, Oryza sativa
MAAAAVLRSHGARRILSYPTLRAAVISGPTALPDASAAAAAAPQQPPPLAGTLWARSMATFTRTKPHVNVGTIGHVDHGKTTLTAAITKVLAEAGKAKAVAFDEIDKAPEEKARGITIATAHVEYETAKRHYAHVDCPGHADYVKNMITGAAQMDGGILVVSAPDGPMPQTKEHILLARQVGVPSLVCFLNKVDAVDDPELLELVEMELRELLSFYKFPGDEIPIIRGSALSALQGTNDEIGKNAILKLMDAVDEYIPDPVRQLDKSFLMPIEDVFSIQGRGTVVTGRVEQGTIKTGEDVEILGLTPSGPLKTTVTGVEMFKKILDHGEAGDNVGLLLRGLKRGDVQRGQVVCKPGTVKTYQKFEAEIYVLTKDEGGRHTAFLSNYSPQFYFRTADVTGKVVLPDGVEMVMPGDNVTAGFELISPVPLEPGQRFALREGGRTVGAGVVSKVYS

SEQ ID NO: 54961 - protein, 419 aa, Oryza sativa
MESNAEKLRGLTITSLDEEDDEPELPHRSPPASGGGGGGGAGYEDDDEEEEEEAEVTLGFLEKPKHPGLLLRHLFPSKAGGIPAWLDPVNLPSGNSRCCGFCGEPLQFVLQIYAPIEDNAASFHRTLFMFMCPSMACLLRDQHDQWKHRQGNPCRSVKVFRCQLPRSNAFYSSEPPKHNDSDKPLCPGAPVCHWCGTWKGDKLCSSCKKARYCSEKHQTLHWRSGHKSDCLQLISSSEASSSIFPAVGKVPASKSWPEYEIAIDYEGAFNSDSCDESNSKSLVMQRPGKPDDMMQSWMDQFEADADNKCWASFQERVSRAPKQVLRYCREENAKPLWALSAGCPSNADIPSCSYCRGPLCYEFQIMPQLLYYFGVKNEPDSLDWATIVVYTCKGSCDQNVSYKEEFAWVQLYPTTTTRS

SEQ ID NO: 54962 - protein, 245 aa, Oryza sativa
MRPVFVGNLDYDTRHSELDRVFYRYGRIDRIDMKSGFAFVYFEDERDGDEAIRALDGYPFGPGRRRLSVEWSRGDRGSRRDGYSKPPVNTKPTKTLFVINFDPINTRVTDIERHFEPFGKLSNVRIRRNFAFVQFETQEEATKALEATHSTKLLDRVISVEYAFRDDTERGDRYDGARGGYGRRDDSPYRRSVSPVYRSRPSPDYGRQRSPVYGSYDRSPVNDRYRSRSPVRRSRSPLANRRAYD

SEQ ID NO: 54963 - protein, 876 aa, Oryza sativa
MAVLGSREQMCIHEEVSKLRGRQQNNACHYLCKKRWCRHHNSVAEFMRNNSELGSEACDIEDLVNIGRTKGPCPYYISRELSKSVDILFAPYNYLIDPGNRRSLNGIPWDNAVLIFDEAHNLESICADAASFDLLPNNLSSCIAEAQECIQLCSAKRTFENSADKQFDPENYAILKALLMALEKKISEVVIVSKELGHTKPGNYIYEFLSELNITSETSKKLIDTIDGASLLLEEGNSAETGPGMKATATVCRLETIRDILDIIFRGGGQSHAKYYRFHVNECQQNSGDALKVLGKVSRTLSWWCFNPGLAMEEFLKLGVRSIILTSGTLSPLDSLALELNLEFPVRLENPHVIASDQIWVGVVPVGPSGHPLNSSYRTRETLKYKQELGITIVNFARIVPDGLLVFFPSYSMMDKCINCWKDRNHENSSDEHTIWQRICKHKQPVIEPRQSSNFPNAIEDYAAKLRDSSTTGAIFFAVCRGKVSEGLDFADRAGRAVIVTGMPFATPTDPKVRLKRDYLDKLGSASNKNSKALTGEEWYVQQAARAVNQAVGRVIRHRHDYGAIIYCDERFVWQNYQSQMSYWLRPYIKCYKKYGEVVQGLTRFFRDKVSIDSSKPNETDFNDNIVLLADKHKPQETISALAVTTANENQRTALSVNPTTKRSNYIKFAQITPANRSTLSMKHGCSSTSQLLYSGDKLSTDAQVIDLAADVATIHLAGYRFKSLGPKKAKVMVGSKDVCFDDGSPKLQHNVESRALAGCLGEQSTASSKKSNITHAPGNSGAIHEKSGGQESNAGPAFLKLAREKLSTAEYRDFVEYMKALKLKTMHIKDSLDAIAKLFSSPERLPLLEGFRVFVPKNHLSLYEQLVQSYTVPNT

SEQ ID NO: 54964 - protein, 288 aa, Oryza sativa
MMNLISFETPPLGRRSQDGGSSSSSITAATTTTNKAKEAASHLDLSLGISLSPGGGGGDAGTKASSCCYGGGGDGGGCMGSGMLTAGVLGVGHGGSSHDNTTASSGGGGSWTAAFMPSPTGFMHPWSLAARQQKAAAEQERSGVARLPPATTTYMPRAAATVISLPAAVGWPPVHTSRRNLVATINNVLKPDTTAAVKPDRPTQATAMFAADETTAPPPRSAAAATEASRTLNMFAKVHMDVYKVGRKINLRAHRNYDSLRRVLTKMTHNFFCREYPIFLFYFFLITG

SEQ ID NO: 54965 - protein, 583 aa, Oryza sativa; identical to SEQ ID NO: 39694

SEQ ID NO: 54966 - protein, 695 aa, Oryza sativa
MDAAAGGGGEPSPAPGVGGRKHLSSIANHVLRQCSLTLDRSVDELVADFELGLKTAAVDNYSRRLVEFCILQALQVVTSVDLGDKIHDGSLSRFTFDMMLAWETPTPSDQQVTMESIAKEREDKKEPLGANEAVMGDETSLFYSDIMPLLVNEEPTVGEDAYVWFGSVFPLACDVINARFTFEALTATTANRLHYPAYDKFLKEMDKSSEFLQKVSTPTGTELAEDEFILHIEGTAGTQRVVRHIGTTSWPGRLTLTNKALYFEASGKISYEPAFKVELTGSEIGKQVKTTSTGPFGAPLFDKGIEFELPEPLVLEFPEMTSSTRRNMWLTLIREVIFLHRFISMYSIDSPIHKWEVHSRIILGVIRLHAAREMLRMSPPPPSSFLVFSLYDELPKGDFVLEQLANNLKETSAITPLSASHVFKGLSKSHRVALSAEIAKEHDKDSNSHEQPLASLENTIGQVRDEAREVTVANVAIEGMKEEGITDSLLVLVGLVSPMSKLFPVIQKIISWEKPLVTISVLAMMVLTIYREWVGFALAASLILAAGFMVWARQRKIGALCSEVIIDTSSDKTTMESLVEAQQSLKRVHEYIKTANVVILRVSSIALARSPKCGTLDNFLSLQHTETVIWMLTGLALALAVIPFKYVLIGVMAGGFMSNTRIARAMSNPQGSRRWREWWESIPAVPVRAVDGGGL

SEQ ID NO: 54967 - protein, 108 aa, Oryza sativa
MASWCGDLAAPPRLLVAPRPSDGNCQGNVLSLRHPRSDEETGYLFIDGQLHEFNWFKERFGSWFLGDYVCEDGSLYYCTVVDPIFILLPILKAARMSVCQIKSEIFLI

SEQ ID NO: 54968 - protein, 378 aa, Oryza sativa
MAAAAEAVLFLLHHHLAFFGLRISPSVSVPSPRRRSAGEVALLAVVVVAALLTATTHAASATIESRPADALRSEVDELRLRVLHLESLLEENTKTLKSKANNLEENSNLIGTMEHDIEILMNKYESTKKSQSKSYPESNVKALEDEVQLLWRVVRKMNENADSIESLANGAEKRVESLSSEVKKMEGVIAEQWIQIRQLEQAFVLTKMMTSKVHQRSRLSETAYKWPGKDLVLKYFRNLHGTFLMGVSYTKSCFSHTYKHGRSFIQAMNRPYHEVSRFCKAICGQHIRDVDKPNVFFLGGSISRSCISAPYKQLKIFMLLAQNFHHKVQIFLQDAMRSNSYSRGFATEIITFCLAYFVVISPMWILWFLYSTRFGSKE

SEQ ID NO: 54969 - protein, 1099 aa, Oryza sativa
MALPSRRWAGAVESGVDPVAEAWAKLLRSLSQAMARLRVQMESFDDAQMRWALAAGVRAKAQLLASRLAQILALFWDEGQRAALPACVRDALYGMEDMVDDLEYHMLKFQPHQQEVRCNLLISLVNLRYRLIISHASRSRFLKDLDFVASEAGSLLSAMHKLEPTAPSLPALLLADDDHQVVFGRHKEVTDIVRILIDPPASHHHHPTYDILPIVGMGGVGKTTLAKLVYDDAKVKQHFELRLWASVSTSGGFHKIDITEQILRSANPTYPASIHSEPTLDMLQFHLSQLVASKRFLLVLDDIREESFTSMACQEILSPLSSAEKGSRILVTTTTASVPAMLGASCTYHLNVLDIEDLWSLLKKYAFHGGPTHDSTQELEEIGRNIASKLKGLPLAAKMLGGLLGATKSTKTWMNVLDKELYGDSILPVLELSYSYLPRRLKQCFSFCSLFPRNYKFNKRVLIQLWMAQGFVQSQNSADKNMEDLAEDYFEELLSRSFFDVRREACETHYVMHDLVHDLAQSVSADQCLRVEHGMISEKPSTARYVSVTQDGLQGLGSFCKPENLRTLIVLRSFIFSSSCFQDEFFRKIRNLRVLDLSCSNFVQLPNSIGELVHLRYLSLPRTLNMLPESVSKLLHLESLCFHKCSLEKLPAGITMLVNLRHLNIATRFIAQVSGIGRLVNLQGSVEFHVKKGVGCTLEELKGLKDLRGKLKIKGLDNVLSKEAASKAELYKKRHLRELSLEWNSASRNLVLDADAIILENLQPPSSLEVLNINRYQGAICPSWLQLSSLKQLQSLDLINCRNLEILPPLGLLPSLEYLCMKELCTVNQIGHEFYGDDDVPFPSLIMLVFDDFPSLFDWSGEVKGNPFPHLQKLTLIDCPNLVQVPPLPPSVSDVTMERTALISYLRLARLSSPRSDMLTLDVRNISILCWGLFHQLHLESVISLKIEGRETPFATKGLCSFTSLQRLQLCQFDLTDNTLSGTLYALPSLCSLEMIDLPNITSLSVPSDIDFFPKLAELYICNCLLFASLDSLHIFISLKRLVIERCPKLTAGSFPANFKNLTSLKVLSISHCKDFQSFPVGSVPPSLEALHLVGCHQS

SEQ ID NO: 54970 - protein, 164 aa, Oryza sativa; identical to SEQ ID NO: 28650

SEQ ID NO: 54971 - protein, 518 aa, Oryza sativa
MKSLKLNFPLAASALQDSSTTGSSPLHPTVAAKGNIPGSPEADLYMRSLNRASPPHSVVHQNSHAHVNRAGHEASIKQSSENANGSASDVSRLSLAGSETRESSLEERNAGSIGQTSEQSIEEAFQASNLDRDSHDHVGSSSVNGSLPNSGQLDAECDNGPSERTNYSSDASGEVTDGPSASSAPQREHLIPSRLADVRSRGQFVRRPSERGFPRIISSSSMDTRSDLSAIENQVRKLVDDLRSDSVDVQRSATSDIRLLAKHNMENRIIIANCGAINLLVGLLHSPDSKTQEHAVTALLNLSINDNNKIAIANADAVDPLIHVLETGNPEAKENSAATLFSLSVIEENKVRIGRSGAIKPLVDLLGNGTPRGKKDAATALFNLSILHENKARIVQADAVKYLVELMDPAAGMVDKAVAVLANLATIPEGRTAIGQARGIPALVEVVELGSARGKENAAAALLQLCTNSSRFCSIVLQEGAVPPLVALSQSGTPRAREKAQALLSYFRSQRHGNSARR

SEQ ID NO: 54972 - protein, 434 aa, Oryza sativa; identical to SEQ ID NO: 53673

SEQ ID NO: 54973 - protein, 687 aa, Oryza sativa
MSGPVVPLAWTAQGPCEPSPGSGPLPVSAAASDPPAPSSSVPAGGREPSASGLPPAVTPQLGDHDQGGLPNCVPKVGMTFNSENEAYDFYNSYARNVGFSIRKNHANTRADGSLCSKYFLCSNEGQPVASTTQPGRKKRSSTRSDCKARLQFYISREGIWTVQKVELDHKHYLVSPDKSHMLRSQRRLTPSYQQIVNEMRQEGITAADMQRVFRQWSRGAENVHLLKKDTQRKYLQPSYAQKLLEYLKNKQTENPSFFYAVQLNDDGRIANFFWTDCQAIVDYACFGDVVSFDTTFETNKFEMPFAPFVGTNHHKQTILFGASLIYDESSESFNWLFQTFLTAMSGKQPATIFTDPSAEIIKSVRLVFPNSSHRLCLRHICHNAVKHLNHVICNHPEFLSDFKRRIYEERSVTFFDLKWKELVNAYNLDGNDWMNNLYAMREKWAAVYSRDSFYADMMTIQNAEGTSDALKNFRRKLCLPEFLEEYEKCITSFRQNELEADYNSRQTSPVPYVPDLPMLKTAAESYTRNLYSHFEEEFKKLFTLSCSLLSQDRTISTYKLTPLNSEEEAYVVFNSEDTTVSCSCRMYECTGMLCKHALRVLNYSNIFTFPSHYVYKRWTKYAKAGLFGCRNNSQSGNGSSMLRCARISQKMHSVALRYSMSEKALQFLESGVDKLTCEVENLLSHIN

SEQ ID NO: 54974 - protein, 594 aa, Oryza sativa
MQSLALTSPSLPAPATASGRRRRRLERIRATAVSDEPKLNKYSARITEPKSQGASQAVLYGVGLTDADLRKPQVGVSSVWYEGNTCNMHLLRLAEAVRDGVREAGMVAFRFNTVGVSDAISMGTRGMCYSLQSRDLIADSIETVMGAQHYDANISIPGCDKNMPGTIMAMGRLNRPSIMIYGGTIKPGHFQGNSYDIVSAFQCYGEFVTGSISDEQRKNVLRNSCPGAGACGGMYTANTMASAIETMGMSLPYSSSTPAEDPLKLEECRLAGKYLLELLKMDLKPKDIITEKSLRNAMVIVMALGGSTNAVLHLIAIARSVGLQLTLDDFQKVSDQVPFLADLKPSGKYVMEDLHKIGGTPAVIHYLLEQGLLDGDCMTVTGKTLAENAKIFPPLSEGQQIIRPLDNPIKSTGHIQILYGNLAPEGSVAKITGKEGMFFSGPALVFEGEESMITAISENPANFKGKVVVIRGEGPKGGPGMPEMLTPTSAIMGAGLGKECALLTDGRFSGGSHGFVVGHICPEAQEGGPIGLVQNGDKITIDVVKRVIDVELTEAELEERRRKWTPPPHKAARGALWKYTKLVSPASRGCVTDE

SEQ ID NO: 54975 - protein, 785 aa, Oryza sativa
MQQPQASSMTAAARRRQLQGSVLAGKMVLVRKALDTNLNSGDVVCQLVSSTVGDPDNGNRGMLGQEACVHINSELHPTPYEASTFSFEFIWDMKKQGVPGAVIVKNYCDEEFFVNTITLDIVPGYGTIVFTAESWVYPDEIYDHLPRVFFSNQPYLPNQMPAPLVPYREEELRNLRGDDNPGPYKDHDRVYRYDVYNDLGEPDSGNPRPVLGGSDEHPYPRRCRTGRRRTNTDPDSESRNVGFPLTNHFYVPRDEVFNDRKKAYFDTNNLKLYIMQKYATFLLHADQQTPFEFDSFADVLSLYDEGSINLPGWLNTFLQPLLGIIPFKLLQQVLTPDSEFILKFPMPAVIREDKTAWQTDEEFAREMLAGTNPVVIRRLGETEFPPKSKLDTSKYHNQNSRITAAHVEKCLEVEGLTVEQVLADGRLFILDHHDHFMPYLLDANHQPDTFVYATRTLLFHRNDGTLQPAAIELSLPRFEAGSTLISSVGEVYTPASDGVEGHIWQLAKAYVTVNDYSWHQLVSHWLNTHAVMEPFAIATHRQLSVAHPIHKLLHPHYRDNLFINALGRQSLINAGGSSENTVFLGKYGLSMTSEVYRNWNFTEQALPEDFIKRGVAKRRSNGELELLIKDYPYAVDGLAIWSAIETWVRDYCAIYYADDAAVQGDAELQSWWKDVREEGHGDLKDHKWWPEMKTVAELVQSCATIIWIASALHAAVNFGQYMYAGYVPNRPSVSRRPMPKPGTDLYRELELHPEKEFLLTITKQDLSIAGIALVELLSSHSDEPL

SEQ ID NO: 54976 - protein, 63 aa, Oryza sativa
MIVMTHNLDLQLTVSIFSSRNIGDTPYYGRSSVESKPCSVEGSRLRGSGRFGRPAHSTGLPAP

SEQ ID NO: 54977 - protein, 162 aa, Oryza sativa
MALFQDRSPPRPDHPPLRRGCARLRAILPRRGAAGHPDAAGGGADAAVAPPPRRPRPWALPDRRLEAEGVCQRAQRARRRQDRSWPRRLLPAAVRPSRPRRRRLPLHRHQGQRSWDHQPQHPRRSQPHPQQLRQDLSLRFHLLIKLSCSSLHTWTNAQKQYS

SEQ ID NO: 54978 - protein, 923 aa, Oryza sativa
MKRDEVNQSIIISGESGAGKTETAKIAMQYLASLGGGGGIEYEILQTNPILEAFGNAKTLRNDNSSRFGKLIEIHFSTTGRICGAMIQTFLLEKSRVVQCAVGERSYHIFYQLCAGAPASLRDKLNMKKADEYKYLKQSCCYSIAGVDDAQMFRTVTEAMNIVHISKEDQDNVFTMVSAILWLGDVSFTVIDNENHVEIVVDEAAETVARLLGCSIEDLNLALSKRHMKVNNENIVQKLTLSQAIDTRDALAKSLYASLFEWLVEQINKSLSVGKRRTGRSISILDIYGFESFDRNSFEQFCINYANERLQQHFNRHLFKLEQEEYVEDGIDWAKVEFEDNQNCLNLFEKKPLGLLSLLDEESTFPNATDLTFANKLKQHLNNNSCFRGERGKAFAVRHYAGEVAYDTSGFLEKNRDLLHMDSIQFLAKCKSSLPQMFASKMLSQSDNPLPVPYRNSAADSQKLSVAMKFKGQLFQLMQRLESTTPHFIRCIKPNNLQLPAIYEQGLVLQQLKCCGVLEVVRISRSGYPTRMTHQKFARRYGFLLLEDVASQDPLSVSVAILHQFNILPEMYQVGYTKLFFRTGQIGKLEDTRNRTLHGILRVQSCFRGHQARRHARERIRGVLALQSFIRGENARKMYSSLARKHRAAIILQRNLKCWLARRYFVNIRKASVVIQSGIRGCLVRRCAGNVDLLNVLREFESKKEAEGDQILIKASFLAELQRRILKAEATVREKDEENEMLQQRLQQYENRWSEYEQKMKAMEEMWQKQMRSLQSSLSVAKKSLALDETPRMSDSSVDQSWESNGVHIGSASQLVPRTVGREMNASISVISRLAEEFEQRSQVFADDAKFLVEVKSGQADASLNPDMELRRLKQNFDSWKKDFGSRIRETKVILNKLGSGNESSPNSVKRKWWGRLNTSKFS

SEQ ID NO: 54979 - protein, 669 aa, Oryza sativa
MCGIALVLSGGGRVVVAPSAAAAAAVAAVGIQPSDEVLFLPSSNGKGKGVTVDELKAALRRRGPDSLGCERLRVRADGTTLGSDGCDCGVGNGGDVGDTELCFIGATLQLRGAEPILQPMVGQSGNVLVYNGEIYGGVHVADDQNDTQSLLSSLESCCSCECHALVRDEACLCCGSVGKSVPQILSTIKGPWALIYWQKDSKTMWFGRDAFGRRSLLVHWPSPDDPRFILSSVSPPSFASNNSAPTVKVMESGEDNDFPESTNMSYWEELPCGIYSIQLKSLEKSGMCMKEACVSEVRRHDWINSSLDELIQWKRKSIVPTVDDLTSHQNSVGDYCLSQSFRNSTEADKNAAYKVLIALRESVMLRTNLNRLFQDDLNKLKDDELAPIAILFSGGLDSMILAALLDQCLDSKWTIDLLNVSFDGQLAPDRISALAGLKELQRISPIRRWRLVEIDTVLTNLKGESEHVMSLIYPSNTYMDLNIGIALWLAAGGDGWVDGSICNMQDGCRYKYKSTSRVLLVGSGADEQCAGYGRHRTKYRLGGWVLLDEEMRLDVQRIWKRNMGRDDRCISDHGKEARFPFLDENVIKTLLEIPLWDIAKLDEPVGKGDKKILREVANLLGLKEAALQPKRAIQFGSRIARESNRKNFGSNRAANQASAGSVEIHQRAR

SEQ ID NO: 54980 - protein, 169 aa, Oryza sativa
MANTLRLYLTCIRNTLEAAMCLQNFPCQEVERHNKPEVELKTSPELLLNPVLICRNEAEKCLIETSINSIRISMKVKQADELENILAKKFLRFLSMRAEAFQVLRRKPVQGYDISFLITNYHCEDMHKHKLIDFIVQFMEDIDKEISELKLSVNTRGRLVATEFLKQFI

SEQ ID NO: 54981 - protein, 157 aa, Oryza sativa; identical to SEQ ID NO: 31411

SEQ ID NO: 54982 - protein, 637 aa, Oryza sativa
MAAEAAAEIVREIAAVGAADLAAAAEPLRADCLRLARKVSLLSHLVAEVAEAGAGGGDADAADSWLGDLVRALQAARRFVELGRAPARPSRASDQDAVCNNVAVQFKFVTWQLQTVLARLPQSCFQISDEVQEEVDLVRAQLRREMEKKGDIDVNIFSKFHDILALHVSTVGSQSEQSHGQPDTPQMENLCNGHLELQNIIMLVSEISGVPKSDAERITSQLIEGLENMRVTDSKKPVSVSQSSDETKASPETHKKSDAVAIPEDFRCPISLELMRDPVIVSTGQTYERAFIQRWIDCGNRTCPKTQLKLQNITLTPNYVLRSLILQWCEEKGIEPPTRSKNDGAYLEVGGERVAIETLVRNLSSSSLDERKSAAAEIRSLAKKSTDNRILLAESGAISALVKLLSSKDLKTQEHAVTALLNLSIYDQNKELIVVAGAIVPIIQVLRKGGMEARENAAAAIFSLSLIDDNKITIGSTPGAIEALVELLQSGSPRGRKDAATALFNLCIYQANKVRAVRAGILAPLIQMLQDSSRNGAIDEALTILSVLVSHHECKIAIAKAHAIPFLIDLLRSSQARNKENAAAILLALCKKDAENLACIGRLGAQIPLTELSKTGTDRAKRKATSLLEHLSKLQVL

SEQ ID NO: 54983 - protein, 639 aa, Oryza sativa
MADDVSKRCSPEEEVIADILFALPRGPRPVLLRRRGEINRTGGDSTRDGDSAEKSRTGRGHEIRGRAGGVEAEAARGGYSREDLATKGGSVGSRDGGGEAFQSKREGALRYRCTIEDLSTSKGPGGGGGYDYELVGRGGVAAAERDTRCRYSVQDLSTVGKSGGMYDGGNGPGFKEGAQETVDCVQGFKTHPELGLPANDSGTDTETVDVSVSEELIRLQTTISKPKTNTATDDSADDSAAEIEAFDVSEELIRFQTVVSKPWDAIWREAPLVFCDSFLCPTGDRSGLSQSELKDAVASILLNHKGVVSYFRIDSSRSLNLQTLETWFNILSEKKVKEMVLFNCSGPQKLIEFPMDILDGSQVEVLRICFFKIPEVYAFDLSKLHLLDFSYCKFDTEHLLHFVEACPNIRELHLGYYDGNVRIRSDKLEIFQVWCSTMKSVNIEHAPELRKLTIAAFPGKYSSSLSVRVINSLYLEHITCNISNQWITINGSNIQTDDKVLLNVRKLYIGLSMSKRRQREQLSNILNCLTHLEDLTIWRMDTVANNEDYDAALEDWSPKLRVKTCLKSLQICKMEGYQGGKLESDFASAVLVRANRLKRLIIESDKEDVFKKAVGILQKVKWTSPDVSVERRLNPLVSN

SEQ ID NO: 54984 - protein, 192 aa, Oryza sativa
MDNHNLEEEAKESVSKRRKNAEHTGSTVAQAPHNDGHQWRKYGQKWISRAKHSRSYYRCANSKVQGCPATKTVQQMDSSGNGTSKLFNVDYYGQHTCRGDGIANPYVVDTAHHSMEPINQNECNSPTLEHEAHEVQDERFENLCMVQNMPEYLIDFELERAFEFIVNSPLGSEHWTFDDSIRCEHSPICIWG

SEQ ID NO: 54985 - protein, 642 aa, Oryza sativa
MSQLEKGIDGDQAKKTLHPCWSAYKIVDKRAPAVYVNVFTGEATTQFQSVTQSARGGILADAMGLGKTVMTIALILSNPRGELEQDKRGTRDRDTKAQTSRSSVRGGTLIICPMALLGQWKDELEAHSTPGALSVFVYYGGDRTTDLRFMAQHSVVLTTYGVLQSAHKNDGSSIFHRIDWYRVVLDEAHTIKSPRTKAARAAYELTSHCRWCLTGTPLQNNLEDLFSLLCFLHVEPWGDASWWNKLIQRPYENGDERGLKLVRAILRPLMLRRTKETKDKMGNPILVLPPANIEIVECEQSEDERDFYEALFRRSKVQFDKFVAQGSVLNNYANILELLLRLRQCCDHPFLVISRADTQKYTDLDELAQRFLDGVQRDSARRSAPPSQAYVEEVVEEIRQGATTECPICLESASDDPVLTPCAHRMCRECLLSSWRTPSGGPCPLCRSPITKSELITLPSQCRFQVDPENNWKDSCKVIKLIKILEGLQEKREKSIVFSQFTSFFDLLEVPFNQKGIKFLRFDGKLSQKHREKVLKEFSESKDKLVLLMSLKAGGVGLNLTAASNVFLMDPWWNPAVEEQAIMRIHRIGQKRAVQVRRFIVKDTVEERMQKVQACKQRMISGALTDDEVRSARIEQLKMLFT

SEQ ID NO: 54986 - protein, 662 aa, Oryza sativa
MKTICGSLMHELQVIWDEVGEPEAARDRMLLELEQECLEVYRRKVDQANRSRAQLRQAIAQYEAELAAICSAIGETTVHVRQSNQKACGLRDELGAILPYLEEMKRKKVERWNQFLDVVGRIKKISSEIRPANFDPFKVSVDQSDLSLRKLEELRVELKCLEKEKGERVKQVMEYLKTLHSLCVVLGVDFKKTISEIHPSLDEAEGPRNISNTTIEMLAWAIQRLRETKMQRMQKLQDLASTLLELWNLMDTPFEEQQAYQNITCNIAASEAELTEQNTLSIEFLNYVEAEVLRLEQHKASKMKELVLKKKTELEEHRRRAHLVGEEGYATQFTIEAIEAGAIDPSLLLEQIEAYISTVKEEAFSRKDILERVEKWLNAREEEAWLEDYNKDDNRYNAGRGAHIMLKRAEKARVLVSKIPGMVDVLETKTRAWETERGNEFTYDGVRLILMLEEYMVVRQEKEQERKRQRDQKKLQDQRKAEQEALYGSKPSSSKSHSTKKVPRNSTPGVQPPKSEILHSKTIRATKKTEDINTPSPGHKGLDTVGLPIRKLFPSSNSSTLLEMETPRKPFSQITPGNISSAPVRPISTGGTEENRTPKTFAPVPTTPMTVSPHMQMAVTPVLTAKAVSVLSYDEPELTSQEDTEYSFEEKRLAVYLAAQVA

SEQ ID NO: 54987 - protein, 431 aa, Oryza sativa
MEEDPLIPLVHVWNNAAFDDSSCSRSAWLPQSPAVAAVRKGDKENHRPEVVDVAAGYDVEAEIGHIEAEILRLSSRLHHLRVSKQPEPNRDDAPMGEMVAKVRPRPRGLSLGPLDVISIVNREKHPLRTKKPPATRGRGLSLGPMEIAAANPRVPAAAQHQQQQRAGTARILKPIKEPPVQRRRGVSLGPLEIHHGVGSKAPAAARAKPFTTKLNAIREETRPSKQFAVPAKPWPSSNTRQTLDSRQGTAASRAKARSPSPRPRRQSNGKATDTRGGNKVVDELKPKGASSSQSGSAAAAATAKRMAGSSKMRVIPSRYSLTPGASLGSSGAQERRRKQSLPGSSGDANQNEEIRAKVIEPSNDPLSPQTISKVAEMLSKIRTMPPPDESPRDSGCAKRVAELVGKRSFFTAAAEDGRALDVEAPEAVAEA

SEQ ID NO: 54988 - protein, 329 aa, Oryza sativa
MYAKCGDIESAQRVFDRMPEKDVQTWSSMIIGLANHGLGHESLSLFSKMISEGMKPNGVTFVGVLIACTHVGLVSEGKKYFRSMNEVHGIEPTVEHYGCMVDLLGRSGHVEEARQLIRSMTFEPDTIIWRALLGACRIHKNVEIAEEAMAKLRVLDPLGDGHYVLLSNIYAQANSWEGVAEMRKTIRRDNIQRIPGRSSIEWDEKIHEFVSGDRLHPRSKEIYRVLEEMMDRLKQAGYKPMTGLVLQDIDEQSKERSLAEHSEKLAIAFALLTTPARSTIRITKNLRACEDCHSAMKLISLVYDRKLVVRDRNRFHHFSEGQCSCKDYW

SEQ ID NO: 54989 - protein, 161 aa, Oryza sativa
MEPAAAAAAVTAAVDLSTAAADLGRVHLLPCGIKQNGAAAVSDYFKPKDTGVEVEGIRVEEAFFRGRKLQGATISLPDGYRGYVLEKRSGGKDMKKLEGEVSNFKSRAEFQNITYWNHDTTPSAEDPLPRCFHLLTVANAMHTPVTAEEMAYMSAMQNQSS

SEQ ID NO: 54990 - protein, 313 aa, Oryza sativa
MQTPIQLVHYVNRDSLGLANDFHSLGFVPEGTDLHGVADALRVSFGDGRRQSNDFQGVMSHLYDVMYEFNFSLPPDYALVIRALGSLEGTAKALDPDFKVIESAYPFVIGRLLEDPSPDMRKILRQLLICDDGSIRWNRLERLIAAISEQSESSNKSEDRSGENAANKPGWRSFDMHSVVAATEDLFHFILSRKGWRVRVFLVQDIVKASDAFLQEATFPGIFDEEGTTGELHPERSKMIRRVVHGVQSFRQAISLAPDAWTAMLFRTLLKPESQKFILDVFLALAMHSCYKIPETSWICMSRFLNYLDRQGR

SEQ ID NO: 54991 - protein, 827 aa, Oryza sativa
MGARVVLFLAVAVVAAVAQEPNTDAYFVSRFFAKMGRAAPASGAAVCGWPGVACDGEGRVVEFSAAGMGLEGAVPEDTVGKLARLRSLDLSGNRLAALPNDLWEVGASLLELNLSRNAIRGDLPNNIVNFAALQVLDVSHNAFSGALPPALGSIAALRVLDASHNLFQGQLLGTVISGWTNLSSMDLSGNALDGDLPDLSPLLSLSYLNLSGNRLRGSVIGAFHEQMKVIDLSNNSFSGLNFSSGYAGSSLAYLDLSGNELTGEFSVGNRFQNLKHLNLAFNQLSVANLLVSMGEISGLEFVNLSSTGLHGQIPRELSSQLSRLKVLDLSRNNISGVVPDLSSIRLQVLDLSVNNLTGEIPVALVKKLVSMERFNFSYNNLTVCASELSPEAFAAAFARSRNDCPIAVNPDRIQRSGGKRKGMKLALAIVLSLFFSVLGLLCVAVACRRRRKRGDVLPAVKQVSFKEEPGISGPFAFQTDSTTWVADVKVATSVPVVIFEKPLLSFTFADLLAATSNFDRGTLLAEGRFGPVYRGFLPGGIQVAVKVLVHGSAMADQDAARELERLGRIKHPNLVPLTGYCLAGEQRIAIYEYMENGNLHNLLHDLPLGVQTTEDWSTDTWEDNNGGVATENITPEGTATWMFRHKIALGAARALAFLHHGCIPQIVHRDVKASSIYFDCGMEPRLSDFGLSMIAGTSTDNNLLHHSPGYAPPEFSDSENAMATAKSDVYSFGVVLFELITGKKPLGDDYPGQKEASLVNWARAMVKANLGPGIIDPKIRDTGLERQMEEALRIAYLCTAELPSKRPAMQQIVGLLKDIEPKVAEQD

SEQ ID NO: 54992 - protein, 33 aa, Oryza sativa
MNSSHASSSSSFSLCSASVAALQHQLSIADFRV

SEQ ID NO: 54993 - protein, 688 aa, Oryza sativa
MCRICFSGENEGSTKAAKMLPCKLCNKKYHRSCLKNWGEHRDLFHWSSWVCPSCRSCEVCRRPGDPNKLMFCKRCDGAYHCYCQQPSHKNVTHGPYLCPKHTRCHSCGSGVPGSGHSTRWFLGYTCCDACGRLFVKGNYCPVCLKVYRDSEVIPMVCCDVCEKWVHIECDGISEEKYQQFQSDQNLQYTCGACRGECSQIRDTEDAVRELWKRRDVVDHDLMASLRAAAALPSLEDVSPSHPNSDDEKLGAYVMKNDGRNTLKFSFKSNSTKPALDSSEQEKNAIKSSGSNKKHSKKKGNQNNKTVSEQDEIFLEKRNETKSLGSLGDQIADVTRDKSSFKNDADAFVLSSAQSAEKALKLQSAKAAAHNADMIPKVKIKGTKVPSLHFKDVGEENAAKSDTGKGTKLVIHIGSRHKSRSGSPKSEMSNSQKEQELVSMHGGKVDVTSQFKSSRSEIKEKSVMKLVRETGVQQNSLLGDLGASKKHATGKRSNAIVSAMENASESGTRSRSFGQKQSVNHLTENQGNASFSVNNSPDSLKPSLLKLKFKRPIFEQPSTQSSQPEEPGTWASPQEELNVAKGQRSKRKRPSLDKMDGSESKAPAAKRHEQSTGEEAMDANWILRKLGKDAIGKRIEVQLASDGKWHQGVVSNVINGTLCLQLDNGRSENIELGKRAIRLIAQRSKSGKR

SEQ ID NO: 54994 - protein, 250 aa, Oryza sativa
MEQREQAQKAALEALRNASATDNVVRIYKMFAELSKTARPDAPATCFESFLSFHQEAVQAVTDIESIQAATSMAGAVAADEPPVLQEIAQNRSSLSKRRGALGVSKSVSFAPGTLDDGGGKNRSSNASRKCLVLDKIGEDGDEKRSSSGSTTTGALGSSLRLAKQMQCEASSWFMDFVEAALETGLKKKSKASATADGRKQSSCCCPQSLILRVINWVEMEQSGDGSSRKPSHPRAAAIARKLRIKAKNP

SEQ ID NO: 54995 - protein, 136 aa, Oryza sativa
MRDAWRRTSKFSISQRDFARKRKYLCRPMPPYGTLEYRTVTCSMIKVPNPHTVVTHSKDSIASASLLATSPLFLQDDDDDDGENVIGDLVSAEDGSCRCKAHSVQPLRHCVLYIKYLWFPVSSACGVSREDKYAVQ

SEQ ID NO: 54996 - protein, 732 aa, Oryza sativa
MPTTSDERSSSECSVDRANRLSFDPYDLPNDVRQLAQIVYSAHGGEVAVAFLRGGVHIFSGPNFEQVDSYHVNVGSAIAPPAFSSSGCCLASVWHDTLKDRTILKIIRVLPPAILNAQTKVSSAVWERAIADRFWWSLLAGVDWWDAVGCTQSAAEDGIVSLNSVIALLDADFHCLPTIQQRQQHCPNLDRIKCRLLEGTNAQDVRALVLDMQARLLLDMLGKGIESALINPSTLLPEPWQASSDMLSSIGPDKMTVDPALLLSIQGYVDAVLDLASHFITRLRRYASFCRTLASHAVGASSGSGNSRNMVTSPTNSSPSPSTNQGNQGGVASTTGSSQMQEWVQGAIAKISNNTDGAANAAPNPISGRSSFMPISINTGTFPGTPAVRLIGDCHFLHRLCQLLLFCLLFRRRQSPRIPANAQKSSDSSMQKQHLMNSKTEDNTLAVRSGLGAAKLEDGTTSRGQMVGAKGAEENPVGNKSARIGSGNAGQGYTSDEVKVLFLILVDLCKRTATLQHPLPSSQVGSSNIIIRLHYIDGNYTVLPEVVEASLGPHMQNMPRPRGADAAGLLLRELELQPPAEEWHRRNMFGGPWSEPDDLGPLDNTRQLKINGSTNRHLSDMEEDGDSSFGIQNLWPRKRRLSERDAAFGLKTSVGLGSFLGVMGSRRDVITAVWKTGLEGEWYKCIRCLRQTCAFAQPGALAPNTSNELEAWWISRWTHACPMCGGTWVKVV

SEQ ID NO: 54997 - protein, 304 aa, Oryza sativa
MHLRMASPPQPGPYMPDLPAVPAWLNKGDTAWQLVAATFVGIQSMPGLVVIYGSIVKKKWAVNSAFMALYAYASTLIVWVLVGFRMAFGDRLLPFWAKAGPALTQDFLVQRAVFPATAHYGSDGTLETPRTEPFYAEAALVLFEFEFAAITLVLLAGSLLGRMNIKAWMAFTPLWLLFSYTVGAFSLWGGGFLYQWGVIDYSGGYVIHLSSGVAGFTAAYWVGPRLKSDRERFSPNNILLMIAGGGLLWLGWAGFNGGAPYAPNAHRHGRRAQHQRQRDEPPHLDLPRRHLLRQALRSSAPCRV

SEQ ID NO: 54998 - protein, 475 aa, Oryza sativa
MATAAAGDDPPSPPPPAERPGGWFSGLVCGAGRLLAAVLGPDSPDSGTGGSASSSQESSSQSPPPPRGHRGSGDNTAHFATNNQFNQSGKEITLKDSGVGSLALVSEIDPKDAILQMLLQETYSRSECDILIKIIHERVVDSDPDVVEPSIVLPIAWQTSQQQDHVPYSSFRPNTCSASSNVHDCSQQLDNNIVENGWLEESQHALKRSNSCTGHNLDESHSRSVRPKLNDLNISNRQDGILKSHSDIASFEEATTKYPNAFRGIPEDTKKLFKDIPLLGTDNLIFSNIVSYDDTDNDISALRGKRPAVTARTFASATSEANRDNRCPTMLYPYSDRDLTNTFPIKVEPLDDIVPFDPEIVVLSRKNRNTGTICNDPCSVSKLMFQEDKEAAPSSSTGVPLENSPRNCTGASLQRSTQTRRSSPANVYRRQYIDSRTRSRSGPSHQGEPIAVGQEPDLAPTQAKKPVGRPRKSRR

SEQ ID NO: 54999 - protein, 464 aa, Oryza sativa
MSHFKSGSRVKCTMLTVLCGKVGKQRTPPGPVPESQRPRPSFPFLELISSGRLDVHTLINPTVDQFLEAQRALQPRFIYLQGQLLDNEEEIGALVWGDADVSDPQTFSSLICSPFPTIVYLEVPSGEKIAQSLQSKGISYIMYWRYSLSSYAASHFRHSLLSVVRSSCSHAWDAFQLAYASFEQYCVRNNDVQRLMLGPHLLGDAPRIYITPPGNKMAEEEDTSEYFPDIKIYDEDVHLKLLICGAHCTPDSSILNSLEDGLNALLNIEFRWCKLQDRVSAAPPLHVDSALLDGVVTICCDITTSSSSHVSLLLSGSPQTCFDDELLEKHIKKELIESRRLVRVVSVSEDDGPSSAEPLTSMSVASGASTFEVLMTLPKWAAQVLKYLAQETSYKSLVPLGIASVNDTPVSSFDKEDVDRLLFFCTNQDEDEAIGNGLYHHLPRWSASLAKDRVKRNFVSKPAR

SEQ ID NO: 55000 - protein, 77 aa, Oryza sativa
MDKIGTELRLHMRRTTTTLALRKEVEVDGPWTAVDIVSDIRHVDHTSVGHAAAAVALLWLAKLYVCSHSIHVWECEG

SEQ ID NO: 55001 - protein, 306 aa, Oryza sativa; identical to SEQ ID NO: 31908

SEQ ID NO: 55002 - protein, 526 aa, Oryza sativa; identical to SEQ ID NO: 33322

SEQ ID NO: 55003 - protein, 350 aa, Oryza sativa
MEKRATTTRAVVLRLDDLSLPPRRLTVPSRLPVSHLLRALPQPLLESSSFYLTADGRPLLLSAPVASLPPSGSVQLRLRALRGGGGDGGATGAESRDCYLSMYLAKKPDKADPNEARLSRFTCCALSGEPLAAPAVADRLGNLFNKEALVEALLHKRLPKALSHIRGLKDMIPIHLHPKPDADAAGEEVRFQCPVTGLDFNGKYQFLALRKCGHVLSVKALKEVKTSACLVCHKEFDEADKMPLNGTEDEVAALRLRMEEERGKVKEKKEKKVGNGLSGSKHAAAAVMARGAEKLENGKKGEAPSLKRFKAGDHAPAYANKEVYASIFTSSKKSDFKETYSCRSLPLGRN

SEQ ID NO: 55004 - protein, 804 aa, Oryza sativa
MAEVLLSSFAVSIIGKIILFVSEHGLMGIKSDRSVHQELGKLQNSLQAISGVLLDAERKQSTSSALKEWLRKLKDVMYDIDDILDDASTETLKRRVSKDVVTQTNCVHISRLKLRRKLLKRKKKWSSRIREVHEKLNEIAASKKDFGLTDWTVGGQCSEEPERESYSFVYQPDIIGRDDARDEIVSKILRAAEHHDIFVLPLLGLGGIGKTELANMVYHDQQIRERFSKMMWACVSNKFNLKNILQDIIESASGESCKHLNLEHLQNKLRGILQNGNYFLVLDDLWTRDVNEWRELRNLLSSGARGSVIIVTTRENVVASMVGTSDPYKVGALPFHECMQIFTRVAFRQGEENKYPWLLKIGESIVKKCAGVPLAIKSLGSLLFTMRDETQWLRVKEDHLCKIVQGDRDIMPVLKLSYNALPAALKPCLSYLSIFPKDFEYYRRCIIMFWMAHGLLNSNKLSEEIDVGNQYIIELIGSSLFQDSLITFDGSMPHCKLHDIVHDLGRYVLDTDLAVVNCEGQQVSETVRHLVWDLKDFTHEQEFPRHLIKARKARTFISSCNHGSLSKKFLEVLLSKLLLLRVLIISGVRIDELPDSIGNLKHLRYLYLTWNKTIKYLPNSLCKLINLQTLDLYRSDQLIELPRDVNKLISLRYLSLTSKQKQLPEAGLRGWASLTSLQLHSCSELTSLSEGIGSLTALQMLWISDCPKLPSLPASMTHLSSLRELFIDNCPELDLMHPEEAMDGLWSLRSLQIIGLPKLERLPDTLCSASGSLRYLLIEQCPNLRELPSFMQDLTNHQRQGGIH

SEQ ID NO: 55005 - protein, 269 aa, Oryza sativa
MDRYQRVEKPREEAPIKENEIRITTQGRMRNYITYATTLLQDKGSDEVVFKAMGRAINKTVMIAELIKRRIVGLHQNTTTGSTDITDMWEPLEEGLLPLETTRHVSMITITLSKKELDTSSIGYQSPLPADKVKPLVEYENEEDAPSPAGRGRGRGGQGRGRGRGRGTRGNGYMDYADGGWEDDHAPPAYAGNGYTRGRGRGFRGRGRRGGGYGAQPDYQQDGGYYDEAPVHAPPRGRGRGRGRGRGPVRGRGRGGNVNGVMHATAVGA

SEQ ID NO: 55006 - protein, 396 aa, Oryza sativa
MASPAKERDGDGRRAHATMVGVQFINAGYHVIAKQALNVGVNRVVFCVFRDVLALAVLAPLAFLRHRGSPSQARTPLTWRLLVSFFILGLTGIFANQLLFLFGLSYTNPTYAAAIQPSIPVFTFILAALMGTETVNLSTHEGRAKIGGTIVCVMGAVFMVLYRGPALFGSGELELDDAHSHGVIADMSQPEPVGPLSIVFGLQKWHIGVLCLTGNCLCMATYLAFQAPILMKYPCSLSLTAYSYFFGAVLMVISGVFATNCKEDWTLTRSEFGAVVYAGFISSALNTGLLTWANKILGPAMVSLYMPLQPVVSALLSKFFLGSSVYLASIIGGFLIISGLYLVTWARHREKLTIGVPYETCASELLESTSHVVKSRNMASVPYISLSRPSNVPHES

SEQ ID NO: 55007 - protein, 315 aa, Oryza sativa
MDQLVVGVARPSSPSAAAHVAYKIPAGDGPYARAKHYQLVEKDLDASIAWFWKAINSGDKVDSALKDMAVVMKQRGYHADAIDAIKSLRHLCPKQSQDSLDNILLDLYKASGRTKEEIELLKQKLRKIYLGEAFHGKTTKRARSHGRKIHVSVKQETSRVLGNLAWAYMQQGNFMAAEVVYRKAQMVDPDANKACNLALCLIEQRRPADAEAVLAGVLAGRYHARDDDHGAPHTGGKILAKVEELMARITGEVDGRSNSSGGSSSDDDDRDVEDEMVELLDVVVRQWAAPYRRSNRRLPVFEEITPVCREQMAAC

SEQ ID NO: 55008 - protein, 335 aa, Oryza sativa; identical to SEQ ID NO: 32601

SEQ ID NO: 55009 - protein, 168 aa, Oryza sativa
MGRWWPPTSAAAATAEPRSVQLLLLGVALVAASFYAGTVFRSPSAPALLLPPSASRSPDPSRTPGAPKFTNRVSLSYRTKPISVPDYGVDVCPLKYNEYIPCHDASYISQLKKLDRSRHEDLESICPPQEKRLFCLVPPPNDYKIPIRWPTSRDYVLVVTSTIHALLR

SEQ ID NO: 55010 - protein, 415 aa, Oryza sativa
MAEHDLTARMAGHLDCHLVLPLLEFLQERHLYPEEEILEAKIRLLRGTNMVDYAMDIHKSRYGTDDVPEDMVKRRAEVVSRLTSLGEAIDNIHQNQQIGPDQIETLYQYAKFQFDCGNYSFAAQYLHQYRALCTNIERSLSALWGKLAAEILMQNWDVALEELNRLKEIIDSKNFSSPLNQLQNRIWLMHWSIFIFYNHENGRNGIIDLFFQERYLNAIQTNAPHLLRYLATAVVVNKRRRNMLKELIKVIQQEQHSYKDPITEFLECLFVNYDFDGAQQKLIGCEEVILNDPFLGKRIEEGNSITVPLGDEFLENARLFIFETYCRIHRSIDIGMLSQKLNMRYDEGELWIMNLVRNSKLDAKIDSVSGTLIMTTNHVNIHEQFIESLKNLNMRTSMLAKNIVEPAQAMQQATR

SEQ ID NO: 55011 - protein, 607 aa, Oryza sativa
MRELRVAVLIIAVSLPSFSASDRQGDALYDMKQKLNVTGNQLSDWNQNQVNPCTWNSVICDNNNNVIQVTLAARGFAGVLSPRIGELKYLTVLSLAGNRISGGIPEQFGNLSSLTSLDLEDNLLVGEIPASLGQLSKLQLLILSDNNFNGSIPDSLAKISSLTDIRLAYNNLSGQIPGPLFQVARYNFSGNHLNCGTNFPHSCSTNMSYQSGSHSSKIGIVLGTVGGVIGLLIVAALFLFCKGRRKSHLREVFVDVAGEDDRRIAFGQLKRFAWRELQIATDNFSERNVLGQGGFGKVYKGVLPDGTKIAVKRLTDYESPGGEAAFLREVELISVAVHRNLLKLIGFCTTQTERLLVYPFMQNLSVAYRLRDFKPEEPVLNWPERKRVAIGTARGLEYLHEHCNPKIIHRDVKAANVLLDEDFEPVVGDFGLAKLVDVQKTSVTTQVRGTMGHIAPEYLSTGKSSERTDVFGYGIMLLELVTGQRAIDFSRLEEEDDVLLLDHVKKLQREGQLGSIVDRNLNQNYDDEEVEMMIQIALLCTQSSPEDRPSMSEVVRMLEGEGLAERWEEWQQVEVTRRQEYERMQRRFDWGEDSVYNQEAIELSGGR

SEQ ID NO: 55012 - protein, 340 aa, Oryza sativa
MKSKENGSIQKAGKVDHSQRGRPNWVLVAGGVLLSTLSVRLGCKLKQMFDAKKQNSMPKVKRRPGACDLHSNLYRFNDQTSCYCCMSAVADGVEIRQAPGSPLPKSTDLSPLLLVEIPGPESSKENSGVMWTSSPDRLEDPRKPFQYSNSSGSPCFSESGSDIYNKREVIQKLRQQLKRRDEMIAEMQAQIVDLKNSLVVQVTQTTNLQSQLDAASRELFESEREIQHLRKIIADHCVAEALSHDKPLQAGHWQSDATNGHANGYADSSVDDPELHYIGIEKRKGEVEKVEMLKREVCDLKEVIEGKDFLIQSYKEQKLELCGKIRELQEKLSAQVPNIL

SEQ ID NO: 55013 - protein, 322 aa, Oryza sativa
MAAARVAMWVACVLAMAAACQGRLRVGYYKRKCAPAEYVVRAVVGNAVRQNPGVGAGIVRMFFHDCFVQGCDASVLLDPTAANPQPEKLGPPNFPSLRGFEVIDAAKAAVEKACPGVVSCADIIAFAARDASFFLSGGGISYRIPAGRLDGRVSLANETLAFLPPPVFNLTQLVASFQAKGLDADDMVTLSGAHTIGRSHCSSFADRLSPPSDMDPGLAAALRSKCPASPNFTDDPTVAQDAVTPDRMDRQYYRNVLDRKVLFDSDAALLASRPTAAMVARNAAARGRWERRFARAMVKMGGIEVKTAANGEIRRMCRVVNE

SEQ ID NO: 55014 - protein, 299 aa, Oryza sativa
MLGSLMSYSPSVDSKTENTDELIATGVLASLQNFIRKCIVAVLSYGPMPKHIAFIMDGNRRYAKFRSIQEGSGHRVGFSALIASLLYCYEMGVKYITVYAFSIDNFKRDPTEVKSLMELMEEKINELLENRNVINKVNCKINFWGNLDMLSKSVRVAAEKLMATTAENTGLVFSVCMPYNSTSEIVNAVNKVCAERRDILQREDADSVANNGVYSDISVADLDRHMYSAGCPDPDIVIRTSGETRLSNFLLWQTTFSHLQNPDPLWPEFSFKHLVWAILQYQRVHPSIEQSRNLAKKQL

SEQ ID NO: 55015 - protein, 265 aa, Oryza sativa
MAATVAEALAVTDELALPLRAVGDLAAAAGVSREEVVVITQCASLGGKLPFDDASVGSVLAVIKKVENLGDLFITEISRVLKAGGMVLIQSSPSDQDPNNSIQRKLLLGGFVDVQASAASSQDSEHSVTIKAKKVSWSLGSSFPLKKATKGLPKIQIDDDSELIDEDSLLTEDDLKKPELPVVGDCEVGATRKACKNCTCGRAEAEEKVEKLNLTSEQINNPQSACGNCGLGDAFRCGTCPYRGLPAFKPGEKIALPGNFLAADM

SEQ ID NO: 55016 - protein, 210 aa, Oryza sativa; identical to SEQ ID NO: 40296

SEQ ID NO: 55017 - protein, 426 aa, Oryza sativa
MEEASVTGELLEQEAPSSSISGVDWSQLPADLLVCIFGVLEVPDVFSSGVVCRAWHASFLEARRLGICSSNPGPCLVFSSGDRDPSVVTLHSLTTGKNYYVTMPDPPFRTRYIVGSSHGWLITADERSNLLLVNPATQAQIPMPPPETIANVRIRCNGEGVPHGYDLFKLDMSSQDFDTETEPDDLSWEEGRFYFYTRVVLSADPSSGNCTVMILHLLRNLLFFARVGDTHWTWINVNELCWNYHDVLYNDDDRLFYAIRGNGDVHAINTNGPSPILRVVLDAKSSLVDCAKYIVLSELGGLLQVWRYHHYVNNNKERRTSELVVYKVDLVEHKLVELKDFEGHALFIGFNSSFFLREEDFPMLTPNSVYCTDDTVTYICHSRFGFREVSAFHLEDSSFTDLLPIGSRLNWPPPVWFRPSFSKGPL

SEQ ID NO: 55018 - protein, 527 aa, Oryza sativa
MGSGESTAAAAATMAWPRWRRRHGWQLPLHPLQLVGMAVFAVLVAAFYVVLGPYLGSTVAGNTLLALFSSSAAGAAALYVRCTAVDPSDRTHAKKMKRRRQLARARAGRRGGGGGGRLPRLRYGYILWRYVVRLLRRVEVRVMNRWVRRSYLEQWNSSVQLDPMLPFAFTSLDDIVSPHAAAGHDISYCPVCDCEVKLRSKHCKTCDRCVDGFDHHCRWLNNCIGRRNYASFILLMFFVLLMLVIEGGTAIAIFVRCFTDSKGLKMEMEHRLHIRLPKGAHAALSMVFVIFTLYSTVALGQLFFFHVVLIRKGMRTYDYILAMREAAQAFDPFDDSDSSSDESIDFDSPERPSFLSRIFCRKDELSESTRKLSIRIENEPSDGTRRKDDIQINPWTLIKMSKEKAMAAAERARERIRNKLPSTTTSPMKPLPVETKRGPLNQERKHIMTGKEIVPVFTKSWLSGSPTARLSSPRRRFSGSPSPKPQRHRSNFDLRLAEVSRELESHISKQVLCSVVMKGVEDEDSPS

SEQ ID NO: 55019 - protein, 382 aa, Oryza sativa; identical to SEQ ID NO: 45956

SEQ ID NO: 55020 - protein, 43 aa, Oryza sativa
MMPMTTVPMKTTTTPALLISTTALLQRTCLEKKNSGDHRGRTL

SEQ ID NO: 55021 - protein, 1346 aa, Oryza sativa
MGIEDYHVIVLVGEGSFGKVYMGRRKYTRQTVAMKFILQHGKTDKDIHNLRQEIEILRKLKHENIIEMIDSFETPQEFCVVTEFAQGELFEVLEDDKCLPEEQVQAIAKQLVKALHYLHSNRIIHRDMKPQNILIGKGSVVKLCDFGFARAMSANTVVLRSIKGTPLYMAPELVREQPYNHTADLWSLGVILYELFVGQPPFYTNSVYALIRHIVKDPVKYPENMSAHFKSFLKGLLNKSPQSRLTWPALLEHPFVKDDSVEPAADNGTVPYEVKGSEATWKADEIQTSRKQPPVTDPQSRNTVENREIVYDKQNNKKVEGPKHAAEDHHGSATGPGSDISILSECSALDKLEKTSQTVKGANAIIEDSEAPSTALSPIKIWLSNTSTSPRELNIDDANQSLRIVKNLIEAGSYQSFAAIDDIICMFLECTSVIIKTKISDAYSFAVKCLAIGRKLLDTSEGPVLQSYDRHWSSLYELYSQILVSTIDPSGRISRESTACLALMLSRVISGLKTSISSESPKPMEESLIKIINHARSSQLLELLCECLIASGSDIVSGSTNMVPAACEACKAIWYLAHAVDIMSLGTHNFSFPLANSWRQVHAKLDGKMQDQGSLPASQKKDSLSDIDSTHLINIFVKSFLASKPMQVAVYHCLHNGLESAIHASLQLISRACLLDASFCAMICGPINPSSNVNEVEHGGDGTIVSDMFSLLSLCGSYLNKESKQNSNQKCRLSNPHALVVHCCLALATIAACLKSEGNSSASIILTSSQKKQRSRLSVLAHLSSVDDTVKSCLQPHCASAMLALSSLISLENGGQSRSSQCETALALFPRMATIHTLLKLWLSDGSEALCRYNAGLLNLFGLRDGCVGLLETRLKWGGPLAIEQACSVGIPQLLIRLLTDGFSKEPSDEKEGSIHRSGLSPLGVVWTLSALSQCLPGGVFREILYRREHVKLLTDLLSDTHLKALAAWTGLGGGKKGVRELINSVVDILAFPFVAVQSSPNMPSTSASINSGFLLSIASPGGRIGTENKEMLKTIEKNMAQYIQVLLEVSVPGCILHCFDHVNMEDLSRPLAIVAKMVGYRPLASQLLREGLLNHSRVEKLLKGPIAKETLLDFLMIVSDLARMSKDFYEPIDKAGMVGYLKNFLSNEDPDLRAKACSAIGNMCRHSSYFYSSLATNKVIELVVDRCSDPDKRTRKFACFAVGNAAYHNDMLYEELRRSIPQLTKLLLAPEEDKTKGNAAGALSNLVRNSNILCEDIVSQGAIQALLKMVSSYSTVALSPSRKDVLTESPLKIVLFALRKMCDHAACRLFLRSSELLPVIVHLRQSPDPAISEYASAIATKACQP

SEQ ID NO: 55022 - protein, 190 aa, Oryza sativa
MEADKSGEGEKAGGKTISFRCSDGQAFHMPVAAAMLSTAIRKMFDKYPSIDHGGVIELPHQISSGIFPKVKEYCTKHAKVDDKGNPTVSTNTGAAAAASSSSTDDEEEDLKNWDKEFVNMEVKPLHDLLLVAHLLDIKGLFHITCRKVADMLKGKTSEEMRQILNIRNDFTEEEDKAIKEQNPWVFPDPE

SEQ ID NO: 55023 - protein, 143 aa, Oryza sativa
MSSMAGLGASQHGYPPRSHEPWTKLVHRERLPEWFAYNPKTMRPPPLSHDTKCMKILSWNINGLHDVVTTKGFSARDLAQRENFDVLCLQETHLEEKDVEKFKNLIADYDSYWSCSVSRLGYSGTAVISRVKPNFCPIRDWHT

SEQ ID NO: 55024 - protein, 1252 aa, Oryza sativa
MEHDMTVEDFIRTNGLGASGLIETNNQGVSTSSVSDCRSCEHVENGSPSTAPPFWDSDGEDDDPVTSGPRPSDLFGRYTWRIENFSKEKKREMKSEPFEAGGYKWYILVYPQGCDVSNHLSLFLCVANHDKLLPGWSHFAQFTIAVGNLDPKKVKYSDTLHKFWKKEHDWGWKKFMELSKIQDGFLVDDVLEIIAQVQVIREKVDRPFRCLDRPYRRELLRVYMTNIEQIYRRFVEERRSKLCKLIEDKMRWSSFRAFWLAIDQSTRHRMSTEKSDVILKIIVKHFFVEKEVTSTLVMDSLYTGLKALECQSKSKSKKGIIDSVDFVELPVPMVHVDVDMFVLAGDVIALLERAALEPLPCQPVSPKDDKCSQSRTKDGSSGEVNKVSIEREERRLTELGQKIIETFALSHIFSGIEVAYQEAVALKRQEELIREEEEAWLLENEMKGKRGSTTEKDKRAKKKQAKQKKNNRKVKDKDREEKCDSNFPERSQDENTIHDREDSKQAGQISMKVDTSEEGASDVSDNLDGSIEIQKKHSTMENKSLSCSSESATMNNAQGKINNLLESKDQISRNRGKARSRSTSNMNITEDVDDLPSSTTSSDRNTSGCGPAPKLDQETVLLTLKDRLRKLGQRLHEKEIEGRKLLQAHLEKKAAAESATGSSSSLSSNSLEETPEVLKSPDQSSVTISDADINASPSKFGASKEVTPVTPTTILSTEPVPTVASTLSKDEPVLCEDHVSCSTPQIDTPITSNPPQVVKTVTLPSGMLLVGHAIQAPSRSPAPQVDRVSKAIAAPTKSPAPQVDKVSIAVPTPSKSPATQGEKVAKAILVPPKSLAPQVGKVAKTIPTPKQPAPLVDKVTSLDPVSKQMSSMSNSEAREAILPKKAAVLSVSQTPAISRPSSAPLFQVPRSTLPPTPAVQVPPMLSRSMTLAGRSRNEPSPSVPSYTAQTYRNAIIGKSNLDTASASLDHSTSFGQNVALSQPLSSYASAASAMVPPVGRNGQLPGKQGFMFGQGKSEAIDNWNPWKGDSNANKYMWKDDSPYHQMTKGDAHTQSWRDNSYQQAGCSGTGEQGEFGGLQYRQFQREIPTNLVSYQLPGPVGEEFPHLDIINDLLEEEQSSGSMAEPTLHGYHTLGLPYSSRGNLVDSEVTSISSSGRLNLADHYYDEGYPMAYDRLNALYRLREGQNSTLDAYSNGRMDSITSKPWLHNFSNPAVNLGVNPNGFSQQMGNYTNLGSGRVNGEHLYRHANGQW

SEQ ID NO: 55025 - protein, 1170 aa, Oryza sativa
MASSGGGGLRHSNSSRLSRMSYSGEDGRAQAPGGGGDRPMVTFARRTHSGRYVSYSRDDLDSELGNSGDMSPESGQEFLNYHVTIPATPDNQPMDPAILARVEEQYVSNSLFTGGFNSVTRAHLMDKVIESEASYPQMAGAKGSSCAINGCDAKVMSDERGDDILPCECDFKICADCFADAVKNGGACPGCKDPYKATELDDVVGARPTLSLPPPPGGLPASRMERRLSIMRSQKAMTRSQTGDWDHNRWLFETKGTYGYGNAIWPKENEVDNGGGGGGGGGLGGGDGQPAEFTSKPWRPLTRKLKIPAGVLSPYRLLILIRMAVLGLFLAWRIKHKNEDAMWLWGMSVVCELWFGLSWLLDQLPKLCPVNRATDLAVLKDKFETPTPSNPNGRSDLPGLDIFVSTADPEKEPPLVTANTILSILAADYPVEKLSCYVSDDGGALLTFEAMAEAASFANMWVPFCRKHDIEPRNPESYFNLKRDPYKNKVRSDFVKDRRRVKREYDEFKVRINSLPDSIRRRSDAYHAREEIKAMKRQREAALDDVVEAVKIPKATWMADGTHWPGTWIQPSAEHARGDHAGIIQVMLKPPSDDPLYGTSGEEGRPLDFTEVDIRLPMLVYVSREKRPGYDHNKKAGAMNALVRSSAVMSNGPFILNLDCDHYVYNSQAFREGMCFMMDRGGDRIGYVQFPQRFEGIDPSDRYANHNTVFFDVNMRALDGIMGPVYVGTGCLFRRIALYGFDPPRSKEHSGCCSCCFPQRRKVKTSTVASEERQALRMADFDDEEMNMSQFPKKFGNSNFLINSIPIAEFQGRPLADHPGVKNGRPPGALTVPRDLLDASTVAEAISVISCWYEDKTEWGQRVGWIYGSVTEDVVTGYRMHNRGWKSVYCVTKRDAFRGTAPINLTDRLHQVLRWATGSVEIFFSRNNALLASRKMKFLQRIAYLNVGIYPFTSIFLIVYCFLPALSLFSGQFIVRTLNVTFLTYLLVITLTMCMLAVLEIKWSGISLEEWWRNEQFWLIGGTSAHLAAVLQGLLKVIAGIEISFTLTSKSGGDEADDEFADLYIVKWTSLMIPPIVIMMVNLIAIAVGFSRTIYSEIPQWSKLLGGVFFSFWVLAHLYPFAKGLMGRRGRTPTIVFVWSGLLAITISLLWVAINPPSQNSQIGGSFTFP

SEQ ID NO: 55026 - protein, 774 aa, Oryza sativa; identical to SEQ ID NO: 54852

SEQ ID NO: 55027 - protein, 475 aa, Oryza sativa; identical to SEQ ID NO: 51410

SEQ ID NO: 55028 - protein, 421 aa, Oryza sativa; identical to SEQ ID NO: 50768

SEQ ID NO: 55029 - protein, 179 aa, Oryza sativa; identical to SEQ ID NO: 36564

SEQ ID NO: 55030 - protein, 151 aa, Oryza sativa; identical to SEQ ID NO: 35189

SEQ ID NO: 55031 - protein, 1076 aa, Oryza sativa; identical to SEQ ID NO: 44912

SEQ ID NO: 55032 - protein, 363 aa, Oryza sativa
MAPRGKPWKHCCNKCDKSFRSGNALGGHMSCHRSVGNQPKSTSSPPTVVDLHMPLLSSCDDNLLLLPPETQCQMCSKVFSTPGSLREHMMMHGGEKVVVKAEEEAAGLIEALGIADSMQDVMVFSSVKRKRSFRSKRQTPALSLEEIEAADALLLLSGCFDKTSAYEDCYLGDIEDSSLRSIVLTEVNMNAVDRCSVRSVGSKEPINDNNSGYKDCYGQSDKENCLIVPKEEMDPNDFDHELVRDAALRKPRTDNSDEEMKFGDLPAAAMKDNSHRCNTCGKSFGSGQALGGHMRRHYVRKCNRQRGVADHAGSVLMKVQKLKLRLDPILFDVTLPALTDGDCCISVGVKPEPQLWCVTSNLQ

SEQ ID NO: 55033 - protein, 296 aa, Oryza sativa
MNNESRPKWRKVAYGGRQPGYDDNHTDESFLEEMVMNANVVKRDLLKVMVDSVSISQYLCIVALVVSTWTYTLNLVIDEVTLLKLDTSLLLAGFSMLLLTASPFSLKLLSKYVLNTSFFISGLYVLAPIYQTLTRSISSDSIWALAVCLLLVHLFLHDYSGSTIRPPGALNNPKLTSNTSLNASIVASVLVASRLPSRLHVFAIMLFSLQIFLFVPLVAFCIKKFSLRLHLLFSFALMIMTLGVTYQLHHMFFILLLALLVFISIVCPYWLIRIQEYKFEINGPWDEAKLCFDITE

SEQ ID NO: 55034 - protein, 229 aa, Oryza sativa
MSSLRNAIQRRAHKERAQPESRKKFGLLEKHKDYIVRAKAFHQKEETIRKLKEKASFRNPDEFYFKMINSKTVDGIHRPKPEANKYTEDELMLLKTKDMGYILQGIQSEKKKIEKLSSMLHELDNKRPNKHVYFAEDREEVKEIQSRIEQKSSSLGLDNIPSRIKRKTASSYRELEERKQRVQKLEKLYADMALQKELKKPGRKRKLREDEIENQTSRPVYKWRAQRKR

SEQ ID NO: 55035 - protein, 152 aa, Oryza sativa
MLRSLAGAAESGRSSAAAALRRSLHAGGREEVESVAYRMSMLRPPPVVPRRGLPRNSCSLIGRLDGPVRPCGGSSDERPMAYTFLSVSSSPSSPPSSSPSNFRVTLNLQGELAHVSLKHLKQNDLVYVSGLLNSYHKVDPSGEKHTFYKVCQ

SEQ ID NO: 55036 - protein, 379 aa, Oryza sativa
MIPRLHRAIARRSLLTSTALLPAVARHRDAPLPSAPGLPRLLHHAPGASDQARKSGPLTLYRDLVSQGKLQHDIYQENVATQLDNLLRRLEQYEMEMEDYHARLSMWENTREKQRRRLLVQEAEDKQRDGVWIDEKRGFLDKLVSRKRRGNIEPGVGKWVSYLNREKKLDTLVGQKPVAPIAPKGIYLYGNVGSGKTMLMDMFYGATEGLIKHRRRFHFHEAMLEIHDHMHDVWKRRDEDKSIESSAFSWISSLPFDGKIKEWLIGEEKYKQNTQQNHILLAVADKFLVDRQANKSGASILCFDEIQTIDVFAVVALSGILSRLLSTGTVLVSTSNKAPEDLNQDGMQREIFLDLLSKLDENCNKILWNRNRLSPPNSN

SEQ ID NO: 55037 - protein, 762 aa, Oryza sativa
MAILSDVATEVLIPIAAIIGIGFSIAQWVLVARVKLAPSQPGASRSKDGYGDSLIEEEEGLNDHNVVAKCAEIQNAIAEGATSFLFTEYQYVGVFMSIFAVVIFLFLGSVEGFSTKTHPCTYSKDKECKPALFNALFSTVSFLLGAITSVVSGFLGMKIATYVNARTTLEARKGVGKAFITAFRSGAVMGFLLASNGLLVLYIAINLFKMYYGDDWEGLFESITGYGLGGSSMALFGRVGGGIYTKAADVGADLVGKVERNIPEDDPRNPAVIADNVGDNVGDIAGMGSDLFGSYAESSCAALVVASISSFGINHDFTGMCYPLLVSSMGIIVCLITTLFATDFFEIKAVKEIEPSLKKQLIISTALMTVGIALVSWLALPYKFTIFNFGEQKEVTNWGLFLCVSIGLWAGLIIGYVTEYYTSNAYSPVQDVADACRTGAATNVIFGLALGYKSVIIPIFAIALGIYVSFTIAAMYGIAVAAPGMLSTIATGLSIDAYGPISDNAGGIAEMAGMSHRIRERTDALDAAGNTTAAIGKGFAIGSAALVSLALFGAFVSRAGVKVVDVLSPKVVIGLIVGAMLPYWFSAMTMKSVGSAALKMVEEVRRQFNTIPGLMEGTGKPDYANCVKISTDASIKQMIPPGALVMLTPLIVGTLFGVQTLSGVLAGALVSGVQVAISASNTGGAWDNAKKYIEAGASEHARSLGPKGSDCHKAAVIGDTIGDPLKDTSGPSLNILIKLMAVESLVFAPFFATHGGILFKLF

SEQ ID NO: 55038 - protein, 275 aa, Oryza sativa
MDQPAPAPEPMLLDAQPPAAVACDKKQQEGEAPYAEGNDAVTGHIISTTIGGKNGEPKRTISYMAERVVGTGSFGIVFQAKCLETGETVAIKKVLQDRRYKNRELQLMRAMDHPNVISLKHCFFSTTSRDELFLNLVMEYVPETLYRVLKHYSNANHRMPLIYVKLYMYQLFRGLAYIHTVPGVCHRDVKPQNVLVDPLTHQVKLCDFGSAKTLVPGEPNISYICSRYYRAPELIFGATEYTTSIDIWSAGCVLAELLLGQPLFPGESAVDQLVR

SEQ ID NO: 55039 - protein, 187 aa, Oryza sativa; identical to SEQ ID NO: 38966

SEQ ID NO: 55040 - protein, 77 aa, Oryza sativa; identical to SEQ ID NO: 50303

SEQ ID NO: 55041 - protein, 246 aa, Oryza sativa
MSSSSSKLHLPADDSVLLLLTHSNLSTFSSDIRVSKQTSVEALKDKLWRKTGTSVAFMRLQLRDDTGAMIADLDHDDATLASYSPYDGYRLHIIDLDPSSITSGGWLEDTSLVEKYTISDEAYNNLDTNFRKFKEKMAFKNPTSDDKQQQSDKHMEELCADIKVGDRCEVEPGAKRGTVKFVGRAEALGRGFWVGVQYDEPLGKHDGMVKGIRFFECPQGHGAIVRPEKVKVGDYPERDPFEEEEI

SEQ ID NO: 55042 - protein, 256 aa, Oryza sativa
MSVNDIVTSGAKPLFFLDYYATSKLDVDLAEKVIKGIVDGCRQSDCALLGGETAEMPDFYKEGEYDLSGFAGGAVKKDKVIDGKNIMEGDIIIGLPSSGVHSNGFSLARRVLEKSGLSLNDQLPRNDGMITTVGEALMAPTVIYVKQVLEIINKGGVKGIAHITGGGFTDNIPRVFPSGLGAKIFTAAWEVPPVFRWIQEVGKIEDAEMRRTFNMGIGMVLVVSKEAADGILEGTHGPNHAYRIGEVISGEGVHYV

SEQ ID NO: 55043 - protein, 898 aa, Oryza sativa
MPPSRSLACLLLPPLLLLLESVRDADAGPLAVEIVRPSFTATSYDYVDTGGAFLVSRNGSFRAAVFNPGKQQASFYLAVLHAPSGTPVWSANRDAPTSSTGKVQLSVGGITVSDANGTVLWSTPPLRSPVAALRLQDTGDLQLLDAGNATLWRSFDNATDTLLPGQQLLAGAYLSSAKGATDFSQGDYRFGVITADVLLTWQGSTYWRLSNDARGFKDTNAAVASMSVNASGLFAVAADGAMVFRVGLAPAEFRMLKLGSDGRLRIISYALVNSSAPVGGDFIAPAGDCDLPLQCPSLGYCSPAGNGSTCTCPPLFAASVTVAGSCTPGDGSTLASPAACQNNDSSSGGASVSYIALKPLTSYFATKFDAPTNTGVNKTACRALCTASCACLGFFHDSVSLSCRLIGGKQLGSLYKGASDTNLGYIKTFNSATKAGSNQIGSSSANHTVPIVLPSVAAFLLLAVLGWYIWWRNKMSKNGRKKKGKSSTMKVYLGRQKSPSRDTGYNADADDDGGGDDDDIVIPGMPARFSYQEITTMTSNFATKVGSGGFGTVYKGELPGGEGLTAVKKLEAAGVQAKREFCTEITIIGNIRHVNLVRLRGFCAEGSRRLLVYEYMNRGSLDRSLFGRTGPVLEWGERMEVAIGAARGLAYLHTGCEQKIVHCDVKPENILLANGGQVKISDFGLAKLMSREQSALFTTMRGTRGYLAPEWISNAAISDRADVYSFGMVLLELIHGRKNRGEQEAAAPANNVAVAAGSGEHSDLPSGWSSAMTSTASGTSGGGDEYFPMLALELHEQRRYLDLVDARLEGRVDEAEAARTVRVALCCLHEDPALRPSMATVVRILEGSVPPPEPRVEALGFLRLYGRSYPLPVPGSLTAMAGGGSHLDESLKDTSAPR

SEQ ID NO: 55044 - protein, 253 aa, Oryza sativa
MALAQGTGDFSVVVLGSDFAVDAGAVLLNPADREEWHDCLPDLSAPADGEDFSDLEELQVVRVQGTDRAGRRIVRVVGRFFPAPVIGGDRLKKYVLHKLRTELPEGPFCLLYMHSTVQSDDNNPGMSILRGVYEDLPPEYKERLQILYFLHPGLRSRLAIATLGRLFLSGGLYWKIKYVSRLEYLWGDIRKGEVEIPDFVIDHDKILEHRPLTDYGIEPDPLHLADMPAVGYSLGRYEDKWSPEDRWYSRNYM

SEQ ID NO: 55045 - protein, 359 aa, Oryza sativa
MSSAAMKLAVVAALISAAAVGARACLDVGFYDTTCPTAETLIQQVVAAAFRNDSGVAPAMIRMHFHDCFVRGCDGSVLIDTVPGSTTRAEKDAAPNNPSLRFFDVIDRAKSAVEAACPGVVSCADVVAFMARDGVALSGGLGYQVPAGRRDGRTSLEDDALNFLPPPTSTAADLVANFTAKNLTAEDMVVLSGAHTIGVSHCDSFTNRIYNFPNTTDGIDPSLSKAYAFLLKGICPPNSNQTFPTTTTFMDILTPTKFDNRYYVGLTNNLGLFQSDAALLTDAALKATVNSFVRSEATFRLKFARAMIKMGQIGVLSGTQGEIRLNCRVVNPVNVTATAADDHHLTSSSSSSSDEVAAS

SEQ ID NO: 55046 - protein, 282 aa, Oryza sativa; identical to SEQ ID NO: 32154

SEQ ID NO: 55047 - protein, 592 aa, Oryza sativa
MAAALECWSGRPSTDEEMVEQVLMKPHVRSDDSLPTCADAAFAAGEPTTAQAAPKKWQRLGRNFAGAIAAFKSSLNLDNGSLPRDPSPRAVGERPPLLVRGFQQLYSRGGATQQLPEKLVADLRRHFDALPNSYAQAGFDMKDVLLHARLVEQAAGEDQPAVSIEEVPGSNGRGGANEGTVFQLTFACSAPLSWQSMSGSLDSPSFCCKRIQIFEKRGLTLGVVMILVQPGNEVFFKNRVDAALKSAIKKQRKNSGGVKLPFGLCGCQEEGSRNFDEESMFDPDDGQVLDNEPTCKPQLPTPLPQSSVFVSIDEWQTIRSGGEELGRWMLSSEEIEFIDWVGPNSFKGVFRGRKVWVNKMRGCDMGSAYDVEIRQDLLQLMSCGQRNILQFHGICFNENHGLCIIRRMMEGGSVHDIIMQRSKRLSLRDILKIAIDVAEGLAFMNSYAITYRDLNARRILLDRQGNACLGDMGIVTPCNNAGEVTEYETSGYRWLAPEIIAGDPESVSETWMSNVYSYGMVLWEMVTGEEAYSTYSPVQAAVGIAACGLRPEIPRDCPHFLRSLMTRCWDNNPLKRPQFSEIISMLQRQNVR

SEQ ID NO: 55048 - protein, 152 aa, Oryza sativa
MAAAAAATAEEYEEMLRVVEAIATRIRWRLRPHSKRRLLNDILFLCSGLRPVVLMDYGGTMPELQDNLCSLLHHARQESSMLSPLRLMVIKDMLYLIHAKGLAEHASPSARSQHKLAFVDLEKSCSKVFAFSDPVFLFSLSYVLFFFPLLYY

SEQ ID NO: 55049 - protein, 809 aa, Oryza sativa
MSGPKLDRTPSIRDRVEDTLHAHRNELVALLSKYVSQGKGILQPHHILDALDEVQSSGGRALVEGPFLDVLRSAQEAIVLPPFVAIAVRPRPGVWEYVRVNVHELSVEQLTVSEYLRFKEELVDGQYNDPYILELDFEPFNASVPRPNRSSSIGNGVQFLNRHLSSIMFRNKDCLEPLLDFLRGHRHKGHVMMLNDRIQSLGRLQSVLTKAEEHLSKLPADTPYSQFAYKFQEWGLEKGWGDTAGYVLEMIHLLLDVLQAPDPSTLETFLGRIPMIFNVVVVSPHGYFGQANVLGLPDTGGQIVYILDQVRALENEMVLRLKKQGLDFTPKILIVTRLIPEAKGTSCNQRLERISGTQHTYILRVPFRNENGILRKWISRFDVWPYLEKFAEDAAGEIAAELQGTPDFIIGNYSDGNLVASLLSYKMGITQCNIAHALEKTKYPDSDIYWTKYDEKYHFSCQFTADIIAMNNADFIITSTYQEIAGSKNTVGQYESHTAFTLPGLYRIVHGIDVFDPKFNIVSPGADMSIYFPYTEKAKRLTSLHGSLENLISDPEQNDEHIGHVDDRSKPILFSMARLDRVKNITGLVEAYAKNARLRELVNLVVVAGYNDVKKSKDREEIAEIEKMHELIKTYNLFGQFRWISAQTNRARNGELYRYIADTHGAFVQPAFYEAFGLTVVEAMTCGLPTFATVHGGPAEIIEHGISGFHIDPYHPDQAANLIADFFEQCKQDPNHWVEVSNRGLQRIYEKYTWKIYSERLMTLAGVYGFWKYVSKLERRETRRYLEMFYILKFRELAKTVPLAVDEAH

SEQ ID NO: 55050 - protein, 198 aa, Oryza sativa
MAFLVERCGEMVVSMEMAPPPMPHQPYHHHHHLNPFSLPPPPPAYHHHHLIQEEPATTAHCTVAGDGGEGGDFLAALSEDNRQLRRRNSLLLSELAHMKKLYNDIIYFLQNHVAPVTTTATTPSSTAMAAAQHHLPAAASCRLMELDSPDHSPPPPPPKTPATDGGDTVKLFGVSLHGRKKRAHRDDDDGVHDQGSEV

SEQ ID NO: 55051 - protein, 431 aa, Oryza sativa
MYSEKKKARARDGDGDRDAAERRRKGKAPCLEPPPTPPRAMAAAAAAEAGPSRGGCVPSRNPLKDPGDCEAVAIRDTDGEDCGHFSCDMDEIADIEMGMAARGDPMCEHETCLATGSNLMMVCPECGWCFCVGGLAHRAKPLGHIREHAYRRAHWVALRCEDPCEGYCFECEDSLAIESQMVADDGAGGGEEGYGCVVTGMPNLGNTCYLNALLQCLLVLGKLRARILGPGAPSGVLGDLLHDLFVGTNGPSYARRLLDPAMLLRCVRFRYPQFRGIAMQDCHELLCCLRDGLDEDERKWRAGKMQQGAPSAVAPTVIDSIFAGQLSVTLSCKCCSFKSDSEEVFHDLSMPLPPKGTPARSVASPPRNGRCISQQKTHMELFPAINKTNTEKIHAISEGGDAQVPASESEHMVMVKTSEPLEVGKFMCSCA

SEQ ID NO: 55052 - protein, 238 aa, Oryza sativa; identical to SEQ ID NO: 31955

SEQ ID NO: 55053 - protein, 573 aa, Oryza sativa
MAAAAALRCNPRPSAAVALRGAAAAPQVGNEAAFELLVGATEPCLRGRRRGAGIRCQRSAAASAVVVEKKSRAVEPAREGANAGHTESELTVVMKFGGSSVASAERMREVADLILSFPEERPVIVLSAMGKTTNKLLMAGEKAVGCGATNVSELDELTFIKELHFGTIDQLGLDRSIVSGLSDELEQLLKGIAMMRELTLRTRDYLVSFGECMSTRIFAALLNKLGVKARQYDAFEIGFITTDDFTNADILEATYPAIAKRLHGDWVTGPAIPIVTGFLGKGWKTGAITTLGRGGSDLTATTIGKALGLREIQVWKDVDGVLTCDPNIHPNAKPVPYLTFDEAAELAYFGAQVLHPQSMRPAREGDIPVRVKNSYNRRAPGTLITKARDMSKTVLTSIVLKSNITMLDIVSTRMLGQYGFLAKVFSIFEDLGISVDCVATSEVSISLTLDPSKLWSRELIKQELDHVIEELEKIAVVHLLQHRSIISLIGNVQRSSLILEKAFNVLRTNGVNVQMISQGASKVNISLVVHDSEAKQCVQALHSAFFESGFLPEVNDILQDDSVAHSNGTVYRH

SEQ ID NO: 55054 - protein, 132 aa, Oryza sativa
MFPSKGLLSDLKLQVHTIDVGESNSNGKGKGKGKAGKGVVRAKPINWPPALCKFLIDWYIEKKLKLPPKGVIKKIHRTACTSAIDAKYGSTYTADQVQRHYRCHKENWGLVARHLNDSGNGWDETNRMLTLS

SEQ ID NO: 55055 - protein, 693 aa, Oryza sativa
MAHLPLLLLSFLLLIGVHASVSDGSPLPHTYNTSICSKSYKCGGVNISYPFYLSNATGETYDYTQFSCGYTDLNITCSWDGSKQTPFIQLNGDNYTILEIIYDSRTIVLVDTDALRGGSCPRVRHNITFSQADEWLQYTGPRDNLTFFFGCNLVPLPPMDPGLTRFVDKNQINCKDFSNWPDGGDSFVFTSVELEAPMEYELASRCRQVIVVPVNGSILNSSSQSALPSGEYGQVLKKGFELAWKSRKDKQCNLCEQSRGQCAYSQNRTFLGCLCADGKVSSTDCTSRSNLKTKIIAGVVGGGLSAVFALGLIATVFFVRKRKHKKVNSSSKLLKYSGSGGTPRSMGGDMESGSVKDLQTHLFSYEELEEATDSFNENRELGDGGFGTVYKGILRDGRVVAVKRLYNNSYRRVEQFVNEAAILSRLRHPNLVMFYGCTSSQSRELLLVYEFVANGTVADHLHGHRAQERALSWPLRLNIAVESAAALTYLHAIEPPIVHRDVKTTNILLDADFHVKVADFGLSRLFPLDVTHVSTAPQGTPGYVDPEYHQCYQLTDKSDVYSFGVVLVELISSKPAVDITRQRNEINLAGMAINRIQKSQLEELVDLELGYESDPATKKMMTMVAELAFRCLQQNGEMRPPIKEVLEGLKGVQDLCVMEKDGGKDKKGPDPPLSPDTVHAQWDSRQTTPNTSQ

SEQ ID NO: 55056 - protein, 291 aa, Oryza sativa
MRDENSIKTKLSWSKTFVRKWFNIKTKAKDFHSDYAVEEVGVQWRTSFSERDVCKSKKSRTERLPRKSVDRDSRVGNGFDRAYITNTQDYRVFVATWNVGGRSPSSHLNLEDWLHTSPAADIYVIGLQEIVPLNAGNVLLTEDNGPAKKWVALVRKTLNNIDQGSVVYNYHTPSPVPDPIVELNVDFERSSRRPRNSSFFHRRSFQSFNRSSRIDMMDPHSLVDRRFSVCDRISFGSRPSDVDTSMRYGGSSDDENIDEESPSGIYISPMPYGYGAPLCYDDNKRQLINTR

SEQ ID NO: 55057 - protein, 798 aa, Oryza sativa
MKEDIMFDNQTKPCRSRVDSKSNINVLKPKFGSSWGSQIVKGFTADKKTKKTAAAASKKPPLASVENVNTSNQQIPYHSRVKRSLMGDFPCSPAGAQVHPHVFDCHGIRSPASHDLFLELDHLREQLRESKERELALQSELRQCRENPRVSELEKDLDSRKNEIDRLVRLKTSLEVEKTSLSEQLSALSCMVEQHEENARLDGHGNRVSSMNGGNASSSENLEIEVVELRRLNKELQFQKRNLAIKLSSAESKLAVIEKNAESEIVAKVQAEASLLRHTNANLSKQVEGLQMSRLTEVEELAYLRWINSCLRHELSNSDQAARAMTDADYNDEIACHVDDCDGDARLDQNSSDHKKFSIAERIKQWSQNHKNCEASKKEALLDRAWIEAAECRSPTRRHSLGGPKGCAQEFSIVKRRQSDTFICLPEATDEAISCNKDETIREKRELLVDKYDFGRSESSRFLLGKSEVCKSQSMDVEKRALRIPNPPPRPSVSVPHSGPSNGSAANPPKPPPPPPPPKFSTRNAGVMKRAPQVAELYHSLMRRDSKKDTSGSGICETANSANVRSSMIGEIENRSSHLQAIKADVETQGEFVKSLIKEVTNAAYKDIEDVVAFVKWLDDELGFLVDERAVLKHFDWPERKADTLREAAFGYQDLKKLESEVSNYKDDPRLPCDIALKKMVTISEKTERSVYNLLRTRDATMRQCKEFNIPTDWMLDNNLIGKIKFSSVKLAKMYMKRVAMELQYMGPLNKDPALEYMLLQAVRFAFRMHQFAGGFDPETMDAFEELRNLVHVRNSTQ

SEQ ID NO: 55058 - protein, 326 aa, Oryza sativa
MASAEAKDGEEVMGEGREGDPVDKIRRLLRIAIYNIGYVEGFFPDAYFSDIVVREDDMVIKQLVPIVDSESRRLMNLIDEAEACLCDALKKKYLKTLVFSICEKYEGPVLQEFIFSFSYPSTGPDEVVMMMTRTGSKVITKFEASAVKVTPNQMRSSACKMIRLIVQQTRTYPVQEEHAIEMKLSFYEDTTPEDYEPPFPKYCVNSEDVAIWNNNILKMEVGNINNKHVVLTLKVKSAQSYCKNSIVDDCSDYEMCECETYGYTSAPNDDTEEDYHTGMLASPIKAWYPQDTGTQMTRKRKTGFVLVSSSKKDQVPFGFRCLSPYL

SEQ ID NO: 55059 - protein, 363 aa, Oryza sativa
MAMFARRLLVFHLRPPAHPLAAAIAAPHRRRKHDAVACRAAAGKGTSKARARDKDGSKRQQRRALEEHLKRRTRSGAAFDAGLYRRHSHAEHVPVMLGEVLAAFRRPLPLRSFVDCTLGAAGHSLAMMEAHPEMELYIGMDVDPSALEIGRSRIEAFLANRETNGDDEDASQGTLRAYTHAKNFKYIKHVLGSVDENIAVGTSGVDGILIDLGMSSMQVNRSDRGFSVLQDGPLDMRMDPKATLKAEDILNSWPDLEVGRILRDYGEESNWQSLQKRIVKARAMGGLHSTGELVKLIQRTCTSSGGRQGWIKTATRVFQALRIAVNDELRTLEDALHACFDCLATDGRLAVISFHSLEDRIVK

SEQ ID NO: 55060 - protein, 314 aa, Oryza sativa
MNCAWCMVSCTICSLFLSVEKAVKFALVYRPLHNAKFIFSFLYFTSQKYIYSIIFCLDQVIPKRYASAHFPLESQTITLQRQGKNKKWYPMFYIRKDGSGYMLYGCWKNFVRDNHVKEGDMCIFHLTKFTGGEFGATVHLLRETKSGSLGSFHTSHKRFDLRDGRTWPKVTGVRRVSSRPYLTADRVSLTEEQVRKVEEVVHSIQSEGPMYVSIMNKSNVGTDGLYIIIFGRQFATRYLPEGEQTLTLLMTGKSNAWQVKMRPRSGDAQMITTGWRHFVHDNHLQIEDICLFQLMNDESKLTMTVHIIRRNEKS

SEQ ID NO: 55061 - protein, 457 aa, Oryza sativa
MMAAGGGAGSARSVAWGASALLVAALLLSAPSATEAYDSLDPNGNITIKWDVMQWTPDGYVAVVTMFNYQQFRHIQAPGWQLGWTWAKKEVIWSMVGAQTTEQGDCSKFKGNPPHCCKKDPTIVDLLPGTPYNMQIANCCKAGVINTFNQDPLNAASSFQISVGLAGTTNKTVKLPKNFTLKAPGPGYTCGRAMIVRPTKFFTNDGRRATQALMTWNVTCTYSQFLAQKTPTCCVSLSSFYNDTIVNCPTCSCGCQNNGTSPGSCVNENSPYLQSAIDGPGKWTGQPLVQCTSHMCPIRIHWHVKLNYKEYWRVKVTITNFNYRMNYTQWNLVIQHPNFNNITQLFSFNYKPLTPYGGRINDTAMFWGVKFYNDLLMQAGPLGNAQSELLLRKDSMAFTFDKGWAFPHRVYFNGDNCVMPPPDAYPWLPNASPLTKQPLTLPLLAFWIVLATFLAYA

SEQ ID NO: 55062 - protein, 91 aa, Oryza sativa; identical to SEQ ID NO: 36514

SEQ ID NO: 55063 - protein, 356 aa, Oryza sativa; identical to SEQ ID NO: 31914

SEQ ID NO: 55064 - protein, 632 aa, Oryza sativa
MSQSPPDSSSAAAVPLAPGFRFHPTDEELVSYYLRRRILGRRLRIDAIAEVDLYRLEPWDLPSLSRIRSRDAQWYFFARLDRKVTGAGAGGRGGPGNRTNRATPRGYWKTTGKDRDVHHRGKLVGMKKTLVFHSGRAPKGQRTNWVMHEYRLLDADGTQDLHVVCRIFQKNGSGPQNGAQYGAPYLEEDWEEEDDAIENMPASGAFAEMAAVTDTADESTEEDGNFSLKTNDEPLQTQEYQPEITPVKAQGSNEETNGGGYSCDVFSLDEILQEPENVCKNEEQNAIDDKFTIAELSGYPRQDDGYVGENGPVNWIDPSNGDNTNWPLRAYSTQNHVNGTLSADGFFDTVNGTNSYSGPSDNQNLYLQDDGLTSSHQVGDNMPFYDASSNHKWVDGKDDYLNLNDLLYPPAENQPLFDAGDDLMAYFDATEDDFKFDIMGTEDSNSQLPDMSNFVQKDDNNNKFTLDGISNTALYGASSSGSHGNMYPDTAVPDMPMDDTVDKSFGKRLASMLGSIPAPPAMASEFPPSTGKSVVPLSAVNPSSSIRVTAGIIQLGGITFTGSTEHLQKNGDFNLLLSFTVEGDVSTKSIGFEPDTQMSTTPMVLRSGMYLFFVSAMILMLSYKVGLCIYSR

SEQ ID NO: 55065 - protein, 288 aa, Oryza sativa
MEGKEEDVRLGANRYTERQPIGTAAQGAEEKDYREPPAAPVFEVEELTSWSFYRAGIAEFVATFLFLYISILTVMGVNKSASKCATVGIQGIAWSFGGMIFALVYCTAGISGGHINPAVTFGLFLARKLSLTRAVFYMAMQCLGAICGAGVVKGFQRGLYMGSGGGANAVNPGYTKGDGLGAEIVGTFVLVYTVFSATDAKRNARDSHVPILAPLPIGFAVFLVHLATIPITGTGINPARSLGAAIVYNRAHAWHDHWIFWVGPFIGAALAAIYHVVVIRAIPFKSRD

SEQ ID NO: 55066 - protein, 99 aa, Oryza sativa
MWPLGFFSERLFKVAGEGDGGEGADDSPPAPDGRVPLARRSYYVDVPHVQQAFTWDCGLACVLMVLRTLGMDCCDGIADLEKLCRTTRFLSWTRLLLQI

SEQ ID NO: 55067 - protein, 298 aa, Oryza sativa
MAGSLAASAFFPGPGSSPAASARSSKNAAVTGELPENLSVCGIVAKPNPPPAAMQVKAQAQTLPKVNGTKVNLKTVKPDMEETVPHSAPKTFYNQLPDWSMLLAAITTIFLAAEKQWTLLDWKPKKPDMLVDTFGFGRIIQDGMVFRQNFMIRSYEIGADRTASIETLMNHLQETALNHVRTAGLLGDGFGATPEMSKRNLIWVVSKIQLLVEQYPAWGDMVQVDTWVAAAGKNGMRRDWHVRDYNSGRTILRATSVWVMMHKKTRRLSKMPDEVRAEIGPYFNDRSAITEEQSEKLA

SEQ ID NO: 55068 - protein, 141 aa, Oryza sativa
MLLLTIYAIFTLMFGPQSRYQPFVLHKHYYHCLMWTCEVFITYQAVIYGHLASRACDQHSRSCHGIQFVRQPLSCQAFAVNCVLIQIEYFSQPITANLTINSHGQIIYCFLHPPLFLISCSHIMYFHKCINCNINICNEQC

SEQ ID NO: 55069 - protein, 889 aa, Oryza sativa
MAASVEYKLAPHPWASNAPSSNLDLFPSGGGKRRSGSETDSDDEDSIPPDWRSLYHPRLEVAEPAVKDPRDEATSDAWVRRHPALVRLTGKHPFNSEPPLPRLMSHGFITPAPLHYVRNHGAVPKADWSTWAVEVTGLVKRPARLNMEQLVTGFEAVELPVTLVCAGNRRKEQNMVRQTVGFNWGPGAISTSVWRGVRLRDVLRWCGVMGASAGAANVCFEGAEDLPGGGGCKYGTSLRREVAMDPAHDVILAYMQNGEPLTPDHGFPVRVIVPGFIGGRMVKWLKRIIVASSESESYYHYRDNRVLPSHVDAELANAEAWWYKPEYMINELNINSVITTPGHDEVLPINALTTQRPYTMKGYAYSGGGRKVTRVEVTLDGGETWQVCNLDHPERPTKYGKYWCWCFWSVDVEVLELLAAKEIAVRAWDESLNTQPEKLIWNLMGMMNNCWFRVKTKTCRPHKGEIGLVFEHPTQPGNQAGGWMARQKHLETSESAVSTLKRSTSTPFLNTATTQYTMSEVRRHTTPESAWIIVHGHVYDCTGFLKDHPGGADSIMINAGTDCTEEFDAIHSDKARGLLEMYRIGELIVTGSDYSPQSSSADLTSIVESPTAAAAPAVPVSTVALSNPREKVKCRLMDKKSLSYNVRLFRFALPSPDQKLGLPVGKHVYVCASIGGKLCMRAYTPTSSVDEVGYIELLIKIYFKGEDPKFPDGGLMSQYLDYLPLGATIDIKGPIGHIEYAGRGAFTVNGERRFARRLAMVAGGTGITPVYQVIQAVLWDQPDDGTEMHVVYANRTEDDMLLREEIDRWAAAHPARLKVWYVVSKVARPEDGWEYGVGRVDERTLREHLPPGDGETLALVCGPPAMVECTVRPGLEKMGYDLDKSCLVF

SEQ ID NO: 55070 - protein, 713 aa, Oryza sativa
MFGSRVQDEVEMQRRTTNRIFPDERQDQFKLPFQAARADRFGVNRIDAKTTEKIKVISEGNIPWHRRILDPGSSMVIMWNRVFLGSCLFALFIDPFFYYLPLVHVLDESTNRSCIAKDRRLSITITVLRTFADLFYMLNIMVKFHTAYVDPKSRVLGKGELVLDLKKIQRRYLRTDFFIDLLATIPLPQVTVWIIMPSIKNSDYNIRNTTFALVIMIQYIFRMYLIVPLSNQIIKAAGVVAKSAWLGAAYNLLYYMLASHITGAIYYLLSIERQITCWNQQCLNESCSFNFISCDNTGSSSYLTWGKNTSIFDNCDPNRNSSANPPPFNYGMFSTALSKGAVSAPFLEKYFFCLWWGLLQLSSSGNPLQTSAYIAENTFAIAIGALSLVLFAQLIGNMQTYLQSISKRLEEWRLRQRDMEEWMRHHQLPDELQDRVRRFVQVKWLATRGVEEESILQALPADIRRDVQRHLCLDLVRRVPFFSEMDYQLLDAICERLVSFLCPERTYISREGDPVNEMLFVIRGKLESSTTNGGRSNFFNSIILRPGDFAGEELLTWALLPKTNVHFPLSTRTVQSLTEVEAFALRAEDLKFVANQFRRLHSKKLQHTFRFYSHHWRTWAACFIQAAWRQHQRRKLAESLSRWESYSWWPEEHPPADKPKQEGTSSSTKTIAESAIAQMHKFASASRRFRADDTAIRRLQKPDEPDFSADHFD

SEQ ID NO: 55071 - protein, 545 aa, Oryza sativa
MEGTGEMREVGRETLHGGVVQSVSETDEYKEKTIDSEKDGQFRVQPRWRKFLAHVGPGALVAIGFLDPSNLETDMQAGADFKYELLWVILVGMVFALLIQTLAANLGVKTGRHLAELCREEYPHYVNIFLWIIAELAVISDDIPEVLGTAFAFNILLKIPVWAGVILTVFSTLLLLGVQRFGARKLEFIIAAFMFTMAACFFGELSYLRPSAGEVVKGMFVPSLQGKGAAANAIALFGAIITPYNLFLHSALVLSRKTPRSDKSIRAACRYFLIECSLAFIVAFLINVSVVVVAGSICNANNLSPADANTCGDLTLQSTPLLLRNVLGRSSSVVYAVALLASGQSTTISCTFAGQVIMQGFLDMKMKNWVRNLITRVIAIAPSLIVSIVSGPSGAGKLIILSSMILSFELPFALIPLLKFCNSSKKVGPLKESIYTVVIAWILSFALIVVNTYFLVWTYVDWLVHNNLPEYANGLISVVVFALMAAYLVAVVYLTFRKDTVATYVPVPERAQAQVEAGGTPVVDASAADEDQPAPYRKDLADASM

SEQ ID NO: 55072 - protein, 190 aa, Oryza sativa
MASQKPEKKGPPDAAEEFFHHRMLQPDAISRDRSKLPGPLNWQEHKNTSQCHQTRVCTRLAMHYYNLENPANKATKGVAKDSHMFILRLADKQCFWHVYFRATVAGCSTPFFAELRGEEKPNEVTMCKIVDKYNGSVDICAHCWGGIRHPKDGGFVGYVGALPEGLTINHANMLMLEVRKEERDLKDENC

SEQ ID NO: 55073 - protein, 296 aa, Oryza sativa
MEAKQVKAWLSDAQAELEDANAEVDRLRESLHAAEAELWSTTEQLDGLTSDWKEAAVSWRAREKVLLARVRAAEDEAHAAGQENVELAELHRVVDDENGSLRRALERAVEEVNAANESLELATGENSKLQDAVAEKESAMEALRQENESLKASEAEARGRAKELDGQLAAARKAADHGHGAGELAAAADPLSSLHKWRGDMHGKLSATFLDSNRVMAGRKDRMFASLSNIAELKSAAAAAAMDDFDYEFDHFDGGQYGDLDHAMKQKKRRSILRKFGDFFRRRSLYKRNLAPVIHY

SEQ ID NO: 55074 - protein, 855 aa, Oryza sativa
MAAAAVGGRGERLSSSSPTAAAPQVDAGKYVRYTPEQVEALERVYTECPKPSSLRRQQLIRECPILSNIEPKQIKVWFQNRRCREKQRKEASRLQTVNRKLNAMNKLLMEENDRLQKQVSRLVYENGYMRTQLHNPSAATTDTSCESVVTSGQHHQQQNPAVLHPQRDANNPAGLLAIAEETLAEFMSKATGTAVEWVQMVGMKPGPDSIGIITVSHNCSGVAARACGLVSLEPTKVAEILKDRPSWYRDCRCVDIIHVIPTGNGGTIELIYMQTHAPTTLAAPRDFWTLRYTSGLEDGSLVICERSLTQSTGGPSGPNTLNFIRAEVLPSGYLIRPCEGGGSMIYIVDHVDLDAWSVPEVLRPLYESPKILAQKMTIAALRHIRQIAHESSGEIPYGAGRQPAVFRTFSQRLSRGFNDAVSGFPDDGWSLLSSDGSEDITISVNSSPNKLVGSHVSPNPLFSTVGGGILCAKASMLLQNVPPALLVRFLREHRSEWADPGVDAYSAASLRASPYAVPGLRTSGFMGSQVILPLAHTLEHEEFLEVIRLEGHGFSHDEVLLSRDMYLLQLCSGVDENATSASAQLVFAPIDESFADDAPLLPSGFRVIPLDTKMDGPSATRTLDLASALEVGPGGASRASVEASGTCNRSVLTIAFQFSYENHLRESVAAMARSYVRAVMASVQRVAVAIAPSRLGPQIGMKHPPASPEALTLASWIGRSYRAHTGADIRWSDTEDADSPLALLWKHSDAILCCSLKPAPMFTFANNAGLDILETTLVNLQDISLEMILDDEGRKALCSEFPKIMQQGFTYLPGGVCKSSMGRQASYEQAVAWKVLSDDDAPHCLAFMLVNWTFM

SEQ ID NO: 55075 - protein, 180 aa, Oryza sativa
MASRGGGARRTRPNVLVTGTPGTGKTTTCSLLADAVDLRHINIGDLVREKSLHDGWDEELECHIINEDLVCDELEDVMEEGGILVDYHGCDFFPERWFDLVVVLQTDNSILHDRLTSRGYMGAKLTNNIECEIFQMLLEEARESYKEEIVMPLRSDNVEDISRNVGTLTEWINNWRPSRS

SEQ ID NO: 55076 - protein, 275 aa, Oryza sativa
MALPGRLRALILAVALPLLFLSASEAGTVGINYGRVANDLPNPAAVVQLMKQQGIAQVKLYDTEPTVLRTLANTGIKVVVALPNEQLLAAASRPSYALAWVRRNVAAYYPATQIQGIAVGNEVFASAKNLTAQLVPAMTNVHAALARLSLDKPVKVSSPIALTALAGSYPPSAGVFREDLAQAVMKPMLDFLAQTGSYLMVNAYPFFAYSGNADVICLDYALFRPNAGVLDSGSGLKYYSLLDAQLDAVFTAVSKAWELQCRARRGVGDRVAVQG

SEQ ID NO: 55077 - protein, 192 aa, Oryza sativa; identical to SEQ ID NO: 33778

SEQ ID NO: 55078 - protein, 911 aa, Oryza sativa
MEAVEELAQLSEAMRQAASLLADDDPSDDSAPRRPSTFLNAVALGNVGAGKSAVLNSLIGHPVLPTGENGATRAPIVVDLQRDPGLSSKSIVLQIDSKSQQVSASSLRHSLQDRLSKGASSGSSRGRVEGINLKLRTSTAPPLKLVDLPGIDQRAVDDSMINEYAGHNDAILLVVIPAMQAADVASSRALRLAKDIDADGTRTVGVISKVDQAEGDAKTIACVQALLSNKGPKNLPDIEWVALIGQSVAIASAQAAGSENSLETAWNAEAETLRSILTGAPKSKLGRIALVDTIAKQIRKRMKVRLPNLLSGLQGKSQMVQDELARLGESMVQSAEGTRAVALELCREFEDKFLAHITSGEGSGWKVVASFEGKFPERIKQLPLDRHFDLSNVKRIVLEADGYQPYLISPEKGLRSLIKIVLDMAKEPSRLCVEEVHRVLLDIVNASANATPGLGRYPPFKREVIAIASNALDSFKNDAKKMVVALVDMERAFVPPQHFIRLVQRRMERQRREDELKNRSSKKPQDADQPMGKRASSPQTGSEKDTKDKSAKDKDKDKSGQQDKDAKEGSSVQVAGSSGEITAGYLLKKSAKTNGWSRRWFVLNEKSGKLGYTKKQEERHFRGVITLEECNLEEVEEEEPPKSLKDSKKANGPEKGPSLVFKITNRVAYKTVLKAHSAVVLKAESTADKVEWVNKIRAVIQSKGGSFKGPNTDGGSMRQSNSDGALDTMARRPADPEEELRWMSHEVRGYVEAVLNSLAANVPKAIVLCQVEKAKEDMLNQLYSSISGQSNAKIEELLQEDHNAKRRREKYQKQSSLLSKLTRQLSVHDNRAASYANDISEAESPRTPNRPGEDWRSAFDSASNGPSSGSESRSRSADGRRGRYENGDVTSGANSGSRRTPNRLPPAPPKY

SEQ ID NO: 55079 - protein, 700 aa, Oryza sativa
MGGDRGKKPVDTPADMLLPSRKRWLGDGGSDRAHGGCLFYETTPSSFTHGSSSSSPNRPLHDRMEVDTKESEIPRQRTENDRKISARIKRSHQARRRQRYEDQEDRVHGNVHFASICPPPVSWLELKHNMEVKLDLNLDDIEKSIVIPRCQEMDTSGNPDKVDKYLVAAKNLTRILNLEHPVLTETGHLRDRARSLHGTTISSIITEFCYLKVWRVSPLRRLGYLPGPIWESSVRSTFNESISATVSSSSSSSFTCSGSTNGSSDNNQASLEDGPDKRLACTGFINIQSVSVLDDIASIITEGGYQQLLRGAFDRHYSELARYFEILDIENILGSHMKDSVEILVNAWVRAMRITLNVLTEMRRQLHKQNFGAFNSFKHDYFMVIATQSIKKLVACGSSMCSWQQNSQDDPSTQSCAARESTKHTTQMILNLVMMYRALNYAMPELLALFSGRTEQIVLAEFRGLIDRSSSTVLQLFMELNNLIKSQRLVMVDIGVHHITRHITEYMRVLFEKKSTIYQMLDSKPNAFGELVMGLVSSLESMLEMNSRSLVLQGQKQVFLLNNLHFMIEQVKRCIDSGLILGESCLVQREDQLDQLITAYIEASWDPVISSFEKRTQVAIILWPHQLFDKFNSSFERIYSVQKTWKVTNPNVRLKLREAIIQKLIPVYQMQMGNQSEKKQMSARYSVEQLESQLLEMFEG

SEQ ID NO: 55080 - protein, 415 aa, Oryza sativa; identical to SEQ ID NO: 49809

SEQ ID NO: 55081 - protein, 183 aa, Oryza sativa
MIIPKKNRNEICKYLFQEGVLYAKKDYNLAKHPQIDVPNLQVIKLMQSFKSKEYVRETFSWQYYYWYLTNDGIEHLRNYLNLPSEIVPATLEKSARPPGRPFGSGPPGDRPRGPPRFEGDRPRFGDRDGYRGGPRGAPGDFGGEKGGAPAEFQPSFRSSGGRPGFGRGGGGGFGAGPTSSSME

SEQ ID NO: 55082 - protein, 188 aa, Oryza sativa
MAAPFVYCRPTDDGTSESALLRAAFDGNLGRLKGILKSLGIEKGKTQYAVLALNKHGIGMLHAVACQGHLNVCKFLVEELGGDVNIAGKEDITPFMAAAESGDVPTVQYFLDHGGDVTKADVRGCTVLHHAAGTGCCKVTEFLLSKGIPVDIDCGLGTPLFHAANNGKDKTLKILLDHKADWLFVTDI

SEQ ID NO: 55083 - protein, 841 aa, Oryza sativa
MGRGCLAALLGGAVAVAVLVAVVHCAVTYDKKAVLVDGQRRILFSGSIHYPRSTPEMWDGLIEKAKDGGLDVIQTYVFWNGHEPTPGNYNFEGRYDLVRFIKTVQKAGMFVHLRIGPYICGEWNFGGFPVWLKYVPGISFRTDNEPFKNAMQGFTEKIVGMMKSENLFASQGGPIILSQIENEYGPEGKEFGAAGKAYINWAAKMAVGLDTGVPWVMCKEDDAPDPVINACNGFYCDTFSPNKPYKPTMWTEAWSGWFTEFGGTIRQRPVEDLAFGVARFVQKGGSFINYYMYHGGTNFGRTAGGPFITTSYDYDAPLDEYGLAREPKFGHLKELHRAVKLCEQPLVSADPTVTTLGSMQEAHVFRSSSGCAAFLANYNSNSYAKVIFNNENYSLPPWSISILPDCKNVVFNTATVGVQTNQMQMWADGASSMMWEKYDEEVDSLAAAPLLTSTGLLEQLNVTRDTSDYLWYITSVEVDPSEKFLQGGTPLSLTVQSAGHALHVFINGQLQGSAYGTREDRKISYSGNANLRAGTNKVALLSVACGLPNVGVHYETWNTGVVGPVVIHGLDEGSRDLTWQTWSYQVGLKGEQMNLNSLEGSGSVEWMQGSLVAQNQQPLAWYRAYFDTPSGDEPLALDMGSMGKGQIWINGQSIGRYWTAYAEGDCKGCHYTGSYRAPKCQAGCGQPTQRWYHVPRSWLQPTRNLLVVFEELGGDSSKIALAKRTVSGVCADVSEYHPNIKNWQIESYGEPEFHTAKVHLKCAPGQTISAIKFASFGTPLGTCGTFQQGECHSINSNSVLEKKCIGLQRCVVAISPSNFGGDPCPEVMKRVAVEAVCSTAA

SEQ ID NO: 55084 - protein, 107 aa, Oryza sativa
MAKRLRESIFHDLLKKNMNQMYRYQVHQSQCLFREDWVNADALFKLFIEGRCSTPLLNTQIWNMLHFPVHFSMDPICFEVLMQIEEPEFLQGEKIFNAHRDSLQPWQ

SEQ ID NO: 55085 - protein, 451 aa, Oryza sativa
MRECISIHIGQAGIQVGNACWELYCLEHGIQADGQMPSDRTVGGGDDAFNTFFSETGAGKHVPRAVFVDLEPTVIDEVRTGCYRQLFHPEQLINGKEDAANNFARGHYTIGKEIVDLCLDRIRKLADNCTGLQGFLVFNAVGGGTGSGLGSLLLERLSVDYGKKSKLGFTVYPSPQVSTSVVEPYNSVLSTHSLLEHTDVAVLLDNEAIYDICRRSLDIERPTYTNLNRLVSQVISSLTASLRFDGALNVDVNEFQTNLVPYPRIHFMLSSYAPVISAEKAYHEQLSVAEITNSAFEPSSMMAKCDPRHGKYMACCLMYRGDVVPKDVNAAVATIKTKRTIQFVDWCPTGFKCGINYQPPSVVPSGDLAKVQRAVCMISNSTSVVEVFSRIDHKFDLMYSKRAFVHWYVGEGMEEGEFSEAREDLAALEKDYEEVGAESDENEDGDDGDEY

SEQ ID NO: 55086 - protein, 1029 aa, Oryza sativa
MAAPADPRRVRNTCILAHVDHGKTTLADHLVASCGDGLVHPRLAGRLRFMDYLDEEQRRAITMKSAAVVLHHGGHRVNLIDSPGHIDFCSEVSSAARLSDSALILVDAVEGVHIQTHAALRQAFLERLRPCLVLNKLDRLISELHLTPAEAYTRLHRIISDVNSIHSALRSHSYFSLLSSLEDQPSSASSSSPDELPEDVDEDEEDAFQPQKGNVVFACALDGWGFRIHQFAEFYAAKLPNINANALLKGLWGPRYFHKKKKMIVGKKGMEGGDAQSMFVEFVLKPLWQAYQGVLSENGELVKKVITNFSLQVQQRELQNKDPKVVLQAVMSRWLPLADAVMTMVVECTPDPVAAQGVRVARLMPKREVAPEDAAGSPDIVVDAERVRSCVEACDARADAPVVVYVSKMFAVPYKTLPFRGVDGELLNHQGANESEECFMAFARVFCGVLRAGQKVFVLSPLYDPMKGEAMQKHVQEVELQYLYEMLGQGLRPVSSVCAGNVVAIQGLGHHILKSATLSSTKNCWPFSSMMFQVSPMLKVAIEPSNPADLGALVKGLKLLNRADPFVEYTVSQRGEHVLAAAGEIHLERCKKDLEERFAKVKLVVSDPLVSFKETIEGEGLALIESLKAPREFVEKTTPNGRCTVRVQVLRLPNALIKVLEESEQLLGQIIEGKTAKRNGVLDPHLSQDDGDSAATLRQRLINAIDSELEAFSEQVDKEKLERYRNTWLGYLQRIWSLGPWQVGPNLLLLPDVKSSDSVITSQDGRQGILVRGRSHVSERLGFVCGSDAEANNDLDDSEPSADTPESLHLESVALRNCIVSGFQLATNAGPLCDEPMWGLVFVVEPYIFCDHSDAANHSEQYNIFSGQVITAVKEACREAVVQNKPRLVEAMYFCELTTPTEQLGATYAVLSRKRARVLKEEMQEGTSLFTVHAYLPVAESVGFSNELRSVTAGAASALLVLSHWEAIPEDPFFIPKTHEEIEEFGDGSSIGPNLAKKLMNSVRRRKGLHVEEKVVEHGTKQRTLAKKV

SEQ ID NO: 55087 - protein, 240 aa, Oryza sativa
MAGAGRDELKLLGMWASPYVSRAKLALQLKGVSYEYIEEDLGNKSDLFLRSNPVHKTVPVLIHNGNPICESSIIVQYIDESFPSSAASLLPADPYDRAVARSWAAYIDDKLAAPWRMVYRVKTEEERDELMKQTLAAVDVLEGGLKECSKGKGCFFGGDSVGYVDVVLGGLVSWVHASDKLSGAKLFDAAKAPLLAAWLGRFGELDAAKAVLQDVDKVVEYAKKFQPRDSGTAADRQAVN

SEQ ID NO: 55088 - protein, 428 aa, Oryza sativa; identical to SEQ ID NO: 32373

SEQ ID NO: 55089 - protein, 3 aa, Oryza sativa
MPI

SEQ ID NO: 55090 - protein, 692 aa, Oryza sativa
MAAAAPQLEELVDLEPFSPSLFLDLPPTPHSDDPNDDDLILPFISRMLMEDDIDDKFFYQFPDHPALLHAQQPYAQILDAPSDDTTTNSSDDSASATTNNTTNSAAAANASWPYDPIELSQLLQSPPHPVSDNHDADVGDTRSAPEDDKDLKLLFSAADNMEMLNMAFLKGREEANKLVPTNNTLFAGFDGASLLKTEPAVDEPTLMFGRSGGSGRGRKNRHGEEDDLEAETGRSSKLMVPPQEATAAASEMFDEIMFNWYEVIMKGMEELRVAMDSEAEKKARNGGGAGRRAARAKAAVVDLHTMLIHCAQAVATSDRRSATELLKQIKQNSSARGDATQRLACCFAEGLEARLAGTGSQVYKSLVAKCTSTVDFLKAYKLFAAACCIKKVSFIFSNKTILDAVAGKRKLHIVDYGLSYGFQWPGLFKCLSEREGGPPEVRITGIDFPQPGFRPADQIEETGRRLSNCARQFGVPFRFQAIAAKWETVRREDLHLDREEEEEEEEEVLVVNCLHFLNALQDESVVVDSPSPRDMVLNNIRDMRPHVFVQCVVNGAYGAPFFLTRFRETLFFYSSQFDMLDATIPRDNDERLLIERDILGRWALNVIACEGADRVDRPETYKQWLVRNHRAGLTQLPLQPQVVELVRDKVKKLYHKDFVIDVDHNWLLQGWKGRILYAMSTWVADRDHKSLF

SEQ ID NO: 55091 - protein, 144 aa, Oryza sativa
MMESRYVKVDSRFFLVDDNSSSSSSSCAAAGGGGGDGDYHYLDACFLCKRDITFNRHIFMYKGNAAFCSDDCRQDQMDMDSALAAVKRRHRTLQRSRDMSSSSSPAPAAAQCAANEAGLFAVIPRRPTVADLTTHAAPAVSGTV

SEQ ID NO: 55092 - protein, 379 aa, Oryza sativa
MPKKGTKSRKGTDDEPKQEEKNKLPEHLEVQRTRVVCKGDAPVNTEGFQYAGAFAAMGIDNSVSADKFCKNFKVVVNRLTEDDMEFDMIGIDASMANAFRRILIAEVPTMAIEKVLMADNTSVIADEVLSHRLGLIPLDADPRLFEYISENDVPTERNTIVYKLHVSCKKGSPRLTVKSGDLEWLPEGSQLPLASPAQSGDKQKTYTSFSQSQKDILEKPLGVKFKDITIARLGPGQAIELEVHAVKGIGKVHAKWSPVATAWYRMLPEVVLREEIKDADAEMLVAKCPVNVFDIEDLGNGEKRAVVARPRACTLCRQCVMGPTGEVMGPTVEQVELRRVRDHFIFTIESTGALPPEMLFTEAVRILEEKCERVISGLS

SEQ ID NO: 55093 - protein, 158 aa, Oryza sativa; identical to SEQ ID NO: 30444

SEQ ID NO: 55094 - protein, 200 aa, Oryza sativa
MEALSGRVGVKCGRWNPTAEQVKVLTELFRAGLRTPSTEQIQRISTHLSAFGKVESKNVFYWFQNHKARERHHHKKRRRGASSPDSGSNDDDGRAAAHEGDADLVLQPPESKREARSYGHHHRLMTCYVRDVVETEAMWERPTREVETLELFPLKSYDLEVDKVRYVRGGGGEQCREISFFDVAAGRDPPLELRLCSFGL

SEQ ID NO: 55095 - protein, 500 aa, Oryza sativa
MAGGVSDGGAAHGASGRLESILSDSSMPLARRAWAATTIELGLLTRIAAPAVVMYMINYLMSMSTQIFSGHLGNLELAAASLGNNGIQMFAYGLMLGMGSAVETLCGQAFGAHKYDMLGVYLQRSAVLLTITGVPLAVIYGFSEPILVFMGQSPEIARAAAIFVYGLIPQIFAYAINFPIQKYMQAQSIVLPSAYISAATLALHVLLSWVVVYKVGLGLLGASLVLSISWWVIVAAQFAYIVTSPTCRHTWTGFTWQAFAGLWDFLKLSAASAVMLCLESWYFQVLVLIAGLLPNPELALDALSVCMTISGWVFMISVGFNAAASVRVSNELGAGNPKAAYFSVWVVTISCAIISAILAVVILCLRNYISYLFTEGEVVSNAVADLCPLLAITLILNGIQPVLSGVAVGCGWQQFVAYVNIGCYYIVGVPLGVLLGFVFKLGVKGIWGGMLGGTCMQTAILVWVTLRTDWNNEVEEAQKRLNKWEDKKKEPLLTGIRDNN

SEQ ID NO: 55096 - protein, 534 aa, Oryza sativa
MSSLTILLQRACLRFALLPVPPLRAPLRPPRRPLGLPRRSAMSSSAASRLSHIVAAAGGAAGESSEPPAAAAAASGLAQEDDDLSSAMMGYRLPPKEIQDIVDAPPLPVLSFSPSKDKILFLKRRALPPLSDLAKPEEKLAGVRIDGYSNTRSRMSFYTGIGIHKLMDDGTLGPEKVVHGYPEGARINFVTWSQDGRHLSFSVRVDEEDNTSGKLRLWIADVESGEARPLFKSPEIYLNAIFDSFVWVNNSTLLVCTIPLSRGAPPQKPSVPSGPKIQSNETSNVVQVRTFQDLLKDEYDADLFDYYATSQLVLASFDGTVKPIGPPAVYTSIDPSPDDKYLMISSIHRPYSYIVPCGRFPKKVELWTVDGEFIRELCDLPLAEDIPIATSSVRKGKRSIYWRPDKPAMLYWVETQDGGDAKVEVSPRDIVYMENAEPINGEQPEILHKLDLRYAGTSWCDESLALVYESWYKTRKTRTWVISPDKKDVVHASYSIDLLKMYILILAHQCYEELPWGHMLLQKLRSKMKIPTSC

SEQ ID NO: 55097 - protein, 411 aa, Oryza sativa
MLPQILSGMCSISGLKMVTSLKETTLCWFCFTSRNNICIGRLCRNEVLYETLIVNSVLAGDIQKAEEVFKEIKDLCLRLTVTLCNQMILLYKRIAPGKVASVLMLMEKENVKPSAFTYRLLIDLKGRSNDLAGIEVVLNEMKAYGIEPSTSTQTMVARFYIHGGLTEKAEAVVKEMEAQLSNSKDGRHVIKSLLHLYAALNKPNDVARIWEMCTEPMLEDFLSAIKAWGELGLIEKAEETFEAMANAPEKLSSKYYNAMLNVYAQNKLLSKGKQFVERMCRDGCPNGPLTWDALINLYVNSGEVEKADSFLLNVAEENPDRKPLFTSYFFLMKGYAKRGDIHNTEKIFDRLKNVGYAPRPLHYAVLLEAYVNAKVPAHGFLERMRGDNVRPTKKIVTSLDTLQKGWIAGLD

SEQ ID NO: 55098 - protein, 241 aa, Oryza sativa
MFGKGHDLEAGGSSEPLYPGMVESPDLRWALIHKIYVILSVQLAMTAAVAAFVVKVRGVSEFFVSSNAGFALYIFLLFLPLIVLCPLRYYHQKHPVNLLLLGLFTVAISFAVGMTCAYTSGKVIFEAAALTAVVVISLTAYTFWAAKRGHDFNFLGPFLFSAVMVLILFSLIQIFFPLGKISEMIYGGLASLVFSGYIIYDTDNIIKRYTYDEYVWAAVSLYLDVINLFLALLRVLRAADN

SEQ ID NO: 55099 - protein, 986 aa, Oryza sativa
MGAAEEEAAAAWDKAEAKEERIMVSVRLRPLNGREAGDSCDWECISPTTVMFRSTVPERAMFPTAYTYDRVFGPDSSTRQVYEEGAKEVALSVVSGINSSIFAYGQTSSGKTYTMTGINEYSVLDIYDYIEKHPEREFILRFSAIEIYNEAVRDLLSHDTTPLRLLDDPEKGTTVEKLTEETLRDKDHLRNLLAVCEAQRQIGETALNETSSRSHQILRLTIESSTRQYLGRGNSSTLVACVNFVDLAGSERASQTASAGVRLKEGSHINRSLLTLGKVVRQLSKGRNGHIPYRDSKLTRILQSSLGGNARTAIICTMSPARSHIEQSRNTLLFATCAKEVVTNAQVNVVMSDKALVKHLQRELERLQSEIKFPAPASCTTHAEALREKDAQIKKLEKQLKELMEERDTVKSQLDCLLKSDCDDHSDGRVAKRWDEHSRSSESFARNASEEAFSVSDTSGVPYQDQDNAVFNGSYVFSDDRDDIVFPVQTVDLPEETKHEKFMSPWHPPSHHSSSDCIESYHMTEAASRTASEVSEEHCREVQCIDIHEHRRSTSHKFDLLLPQDTEFQTPELEISKEAVPQPDEDQELESITNRMEDPTRMCPVEEEQQDEIVDTCESNGTTDNDVKLYTCDSNISFDIQKPYPNGCLTVKRCILSSKDRALSRSKSCRASFMIIPNSWFDDSEYTSQTPPNEILKHTPRRFDKVRRSLYPENDNPSSVDRSEFSGEVSSDEVVKDMSTIDEAAKDMCPSDAEQETLTSDISCLTKLKKTDSDHEDELDEYQDQSIRDGSTTLRTVKDVGIDSSLSASPSRWPIDFEKMRQEIIQLWHECNAPIVHRTYFFLLFKGDPADNIYMEVEHRRLSFIRRSFSASPAGGELNSAVVSSLKNLRRERDMLYKQMLKKLTNGEKERVYARWGIDLSSKQRRLQLSRLVWTQTDMEHIRESASLVAKLIELLEPAQALKEMFGLNFTLAPRSERRSFGLLGT

SEQ ID NO: 55100 - protein, 392 aa, Oryza sativa
MDDTPTSSGKSEVNSCEPSWWPPDFLAKIESVSLSRKQSVFSDKEPRSNLRSSSWKASQLLWSTGTYSGFIPNGFYSIIPDKKLKENFPTIPSLDDLQTLEADGLKADIIIVDVERDKKLFMLKQLSGALVKGLNSSPALVIKKIAGLVFDCFKSLDPDVSPARSPTEDNHFFGNKGSQLLGQIKHGSCRPRAILFKVLADAVGLESKLVVGLPDDGGVGFVDSYKHMSVVVSLNSMELLVDLMRFPGQLIPFSAKAIFISHISAAGESDSAENDSCDSPLEPNSPLYGLSDKVEAEGIEASSNLSGRSLRNVMLRSRTFSEGKLSTSCSEPNIANAFWRRSQRRGVAEEPRGASSSPEHPLMKTRARSILGGEQHSFQEYAERELHQDQMV

SEQ ID NO: 55101 - protein, 425 aa, Oryza sativa
MALPYLEAVLCFMILMYIFETYLDIRQHRALKLPTLPKPLVGVISGEKFERSRAYSLDKSKFHFIHEAVTILMDTTILYYRVLPWVWKKSGELATNAGLNAENEILHTLAFLAGVMIWSQITDLPFSLYSTFVIEAKHGFNKQTIWLFIRDMVKGILLSILLGPPIVAAIIIIVQNGGPYLAIYLWGFMFALSLVMMAIYPIVIAPLFNKFTPLPEGVLREKIEKLAASLSFPLKKLFVVDGSTRSSHSNAYMYGFFKNKRIVLYDTLIQQCSSEDEIVSVIAHELGHWKLNHTVYSFVAVQLLMFLQFGGYTLVRNSKDLFESFGFEDQPVIIGLIIFQHTIIPVQHLLSFCLNLVSRAFEFQADAFAKNLGYAPQLRAALVKLQEENLSAMNTDPWYSAYHYSHPPLVERLSALEDADSKKEN

SEQ ID NO: 55102 - protein, 846 aa, Oryza sativa
MEPLNDDFSRDLLVSRVFGDKDKCPEELNEVSYEIARKCGGLPLATIAAASLLLSRPDKPDEWIYVQKSLIPDLRIQPTSEGMAQLLNNSFNNLPHHLKACMLYLSIYKEDHIINPDDLVKQWVAEDFVSATEGKSLDEAARNHFYELVHRGILETEHISCSDEVVSCTVHDMVLNFIKRKAMEENFVTAIDHSQSGIRLADKVRRLSLHFGYSKDAKAPACIRLSQLRSLVFSGFWKCGPSISEFHLLRVLFLHGKHGEFLDLTRIRELFLLTYLQIEGNVCIDLPSELQGLKYLRTLHIGAMVTFLRSEVVHLPPLLHFRLPPNLGYFVDAGSVQSIEELTNLQDLQLACPQIATSDHIKHNMKLLGSIIGILKSLKSLTVVPVCFSEDSNDNENSSIAIFLDFLDKVPPPCSLLQRLELFPRVCVFHRLPSWIITIEKLCILKVAVMELLRKDIETLSMLNALTVFSLYVRTTPAEPIIFDKSGFHVLKYFKFKCSTVSSLRFDEGAMPNLQRLKMEFNGSTVEQYNLENVGFKHLSGVKVSAKICIAGTSEANRMAIASVLNNAIRQNTRISSVIIRFINRVIKDLPIVPTPHTDHMHENLRLDKSVRSWPTQCDGCKELGAGHRFKCEQCNSKVYYDMCCATAPHTLKHPLFPGSVFRFLRKPLASECGRACDACGDLMHGFVYHCFERGLDLHPRCARLPVRTANVKGYVMELRRVSACSRCCICMCGKEGYRNKFWSYRSSQEGQDINVHMACLKDLASKSHETLTKLYEILMGESQWTPTEVLGEDTSDQLVVSSAEDGDRTPLRQDEITEEFQHKDEVCNVLEHGREELRKKETDTR

SEQ ID NO: 55103 - protein, 354 aa, Oryza sativa
MGLLLLSLHFLEQGRDLAGGVVFAALLCSKHLFLVAAPVYFVYLFRHYCCGRGVVRGLGRLVLMGAGVAAVFAAAFVPFLYYGQMQQLFNRLFPFGRGLCHAYWAPNFWVFYILLDKIFAFLLRRLGFNIQIPEASFTGGLVGNSSPFAVLPKVTPITTFLLVILAMSPCLMKAFSKPQPRHIIRWVSYATTCGFMFGWHVHEKASLHFTIPLALIAMDSLEDAKHYFVLSIVSCYSLFPLLFENQEYPIKVMLLLTYATLMWVGFSSHFAAKSPQEGKKVNESGSVVRKNSFIGWISFSYLLGIVAIELWSQVFHHYVFGSRFPFLPLIMVSLYCGVGMMYSWMWQLAWIVRH

SEQ ID NO: 55104 - protein, 91 aa, Oryza sativa
MSPIAASPISASAHRAVALPVDLAHREIRRRRAACVPPACCPSRCRHRRSTITRCAASLPPPSSPRPHAPRARDAAARRSSFHLQTKPRVN

SEQ ID NO: 55105 - protein, 446 aa, Oryza sativa
MASSNNKRPPPYLLLLLLALGAAALSVGILHKMRERRVFSILLQERDQQLISLQALLQKEQEISKEMRRKMDELEAKTSVLSIERTELKNKLMDSETTTTYLTNTQKELEAALVEKEGHINQMKENAAASGPEQMAAIKELLQQKEAELEEIKTKLHDYKKSDTNISESILVGTNNENTTSDTAVPENSANPGDSAPAEEHHSYDNSASESNQDESTGASTNNENATVDTVVVDKYANSSDSTPATTEEPHPYNTTASESNPQENSSPEQHFIKLRTNREDDEPQDKTTGDANDNSNDALEGSHLGKSELPQWSPKLADSQDNSTEELDSTRQLENSQGEANYESRGSNLLEKEVEASNEVEPMKETSPETELETSKDSLSEANQNSTQAVEPVADPADVKPRMPIYNDETKETSKRRRRRKFRSRRKKRTNAPSTNVDGEVTKVR

SEQ ID NO: 55106 - protein, 460 aa, Oryza sativa
MVTHEAALKDPSNTNSKDPTAKGFVEEAPISPQAIRPNSEVFQGLNVIEEHPQTSATIGERRPSLSTQISMNEAYKLAIGAKSSLPSPTLTDVILGKDSSSSVNEELRLLLSQLSASRGLEAPWVDPGPSPRAYGRGDDLIVQNITNRISIERNASGLESLEGSTVSEMEGESATERLRRQIDLDRKSIHLLCKELEEERNASAIAASQALAMITRLQDDKAAMQMEALHYQRMMEEQAEYDSDALAKANELLAQREQQIEELEAELENYRMQFAGGPTEKQSNQVSFNEENIAETLLDETGLEAPAITTPSGINSLVSFEEERAYIVDCLTKLEQKLQSYSNNSTNIHLSNSDVIEDYLSNKMHVVDDGSLQCQESSREAQEPVFLAKEAHSSTVSRKTDLSTLQEEISNLNKRLKTLEGDRNFIEHSINSLRNGKEGVMFIQEIASNLRELRAIAGSK

SEQ ID NO: 55107 - protein, 574 aa, Oryza sativa
MSTNLVNYMKTRLGQESAIAANNVTNWSGTCYITPLLGAFLADAYMGRFWTIASFMIIYILVTNRLGFQFLIAMIDGVIEERDVLMVAGFGVADNGVVGEGAGAGVRRRSVSPDGGADGGGVLGAVPDSAGHRRDQAVRVVVWRGPVRRERRGGEAEQEQLLQLVLLLHQHRRAGGVVGAGVRADARRVGVGVRHPGRRHGRRRRQLLRRHAAVQAPAARGQPADEDRAGARRVGEEVGRRGPRRRVAAARDARQGVRHRGQPQAGAHRAVRVPRQGGGGDAGGQVGGERVGVAAVHGDAGGGAEERGAAAADLGERDRVRDGVRADEHHVRPPGEHARRQHGAALLHPGGVALHLRHPQRHRLGAGVRPPHRAGGARRDGAPTRVHPAAADGHRPRHLRLLHARRRRARRRQAARHRSPRALRRQGRRAHLHLLAGAAVLHHRRRRGVHVRRAAGVLLRPGSRRHAQHVLGAVAHHRRARQLPQHAARDHRYPCHHPERRRRVDPGQPQPRPPRLLLLAARRAQPHQLRRLPRHRQLVHLQEDGGFTGRQGRARRSKLSHEVKLIMTYKGELN

SEQ ID NO: 55108 - protein, 527 aa, Oryza sativa
MLPMLPPPALRAPSAWEQATTSSSIGRSAMEESCSSNWPATPCAAATTADKSNCTVGSTNNSPSEQVGHGDSLIYSLPYLPEDIWRHIHSLMPMSAAARAACLSHSFLNSWRFHPNLSLNFKTLCPRTSRGNFKCKIDSILRNHLGTAKILKLNVADEDSTYPYIDRWLEVAVTPGIEELTLTLHKKYIFACSLLSDGVRDSIRCLQLTFCAFHPMAELGPLRSLTKLHLCGVHITGDELESLLLNSLVLEQLRLNVCNKISFLKIPCVLQHLSCLSVMACRRMQVIVCEAPNLSSISLSGGIKFSLGETLTMKVLSMIRPNVVCYARAQLPSIMPNLESMVLSSDSEAVNIPMLPTKFLCLKHLTIQIARGTFSPSYDYFFLVSFLHASPSLETLYLDVFQEDMRHESIVEDSSAHLRQLPELSHECLKSVEIIGFNSAKSLVELTCCIVKAAASLERLVLDTLRGGDRCSGESNGKICWPVSNAVLKESARAAIAVRRYIEDKVAPTTTLTLVGTCTRCHSLAFG

SEQ ID NO: 55109 - protein, 943 aa, Oryza sativa
MREEVRSSSGAAAEPPPTPVASSAGPSSPAMQANVASIDWSGSRQASRVDSSSHVAPHAHQPSHSFDATGTALDSAPSCRPWERGDLLRRLATYKPTTWASRPKAASSLACARRGWVNVDMDKIECESCGAHLIFSTLTSWSPAEVSNAGEAFAEQLDASHHNSCPWRGNSCADSLVQLHLTQSALIGGFKDRCDGLLQFTSLPVIASSAIEHMRLTRSSQIDRLLSQSITFLSGELSYKAESTTGIDIQQDSSCSYSKARKLISLCGWEPRWLPNVQDCEENSTHSAKNADSVEPFFPRFAEHQKNSFSGSAKKDKGKGKRPLKDSGCSMRSPLLDCSFCGSTVKIWDFRSVSRPCRFSPNNIDAPETGKKLALTRGISAASGINEWVTDGMERDPAEGRDEEATNEGKSLSNAGVDLNLTMAGGLPSIQSSIRIASERFNGGLGRDLMIGQPTGSEVGDHATSYESRGPSSRKRNHEEGGSTVDKPQDRLQHADSIEGSVIDRDGEEVDDAAQDSDIPNKRSRGFDLFGSYLPSSSGAGPSRNFCFDPDADAGKFSHARAAGLAAVDRDSMRESSVAAMDTVHSADEDSMESVEYYPGDGNDIDMPSSSAHRNIEMDDVLGLNYSNQAQQSACVQPASGSDGREIGGSSTNEGEEVLDAVTAPAFARDQLSVGISGGSVGMGASHEAEIHGIDVSLQRAESVVGDAEPNTELTETMGHTGESVPGPGLMDEFVPDEVDRQEPHGDSQDMVSQSVGQADSGSKIYGSTKADSVESGEKIGGHAVGHASRMHPSLSCNAGMQTGLDVSKEEVTQAGKLLIAGDVPMGLDYDPQNGLGATNGENDFESGLPEFDPVKHHNSYCPWVNGTVAAACCSNTESSSSSSPLSGWQLTVDALDTFQSLGQAQNHAMRSDSAASLYMDDHVTPNHKLARRASVSRSHGKC

SEQ ID NO: 55110 - protein, 300 aa, Oryza sativa
MPEGGIFQNSSEVFVQGNIMLCSSSPMLQLPLCLASSRHRHTSRNLKIIGISVALVLVSLSCVAFIILKRSKRSKQSDRHSFTEMKNFSYADLVKATNGFSSDNLLGSGTYGSVYKGILDSEANGIVAIKVFNLDELGAPKSFVAECEAFRNTRHRNLVRVISACSTWDNKGNDFKALIIEYMANGTLESWIYSEMREPLSLDSRVTIAVDIAAALDYLHNRCMPPIVHCDLKPSNVLLDNAMGARLSDFGLAKFLPTHNSTSITSSTSLGGPRGSIGYIAPGNHILHDLSLLLNRKLLF

SEQ ID NO: 55111 - protein, 456 aa, Oryza sativa
MTPPASTGKCTGAAAGEVEEPLLPEFSGGGHGASVSGAVFNVSTSIIGAGIMSIPAAMRVLGVLPALLLIATVAALSDASVEFMLRYTGWDSGPPSYAGIMGDAFGRAGAKALNVCIAFTTTGTLVVYLIIIGDVLSGSAGAGDEHAGVLQELFGAQWWTARELVILVTAIVVLLPLVLRRRVDSLKFTSAVSILLAVVFMFISLGIAVYALFTGTAKMPRMLPDFSRLSSPFELFTAVPIVVVAFTFHFNVHPIRTELSKTSDMKAAVRISLVLCAAIYAAVGFFGFLLFGDATMADVLANFDRSSGAGVPQALNDAARLSYALHLVLVFPLLHFSLRVNVDELLFPGRRPLATDTRRFVALTAVLMAVLYALAIAIPSIWTLFEYSGSTFAVCISLIFPGAIVLRDAHGIAKTKDKALAATMIALAVITSSIAIASNVMSSISGKVEGGHAAGR

SEQ ID NO: 55112 - protein, 448 aa, Oryza sativa
MSFRSIVRDVRDGFGSLSRRSFEVTLASLYGLTGHHKGKTQSSLDELDDSPAIIPESRWASLPPELLREVIRRLEADESTWPSRRNVVCFAAVCRTWREMCKETVLSPEFCGKLTFPVSIKQPGPRDGMIQCYIKRNRSKSTYHLYLCLSNVVTAEGGKFVLAAKRHRKTTCTEYTISMVSGNISRSSRTNIGKLRSNFLGTKFIIYDTQPPYNGAVVPHVGRTSKRFNSTKVSPKVPSVTYNIAQVSYELNVLGTRGPRRMRCMMHSIPASSVEPGGIVPGQPEQIVPRALEDSFRSTTSFSQSFRSTTSFSKSIMDPSMDFSSARFSDISGSIMGGDDNGEIKERPLVLRNKPTRWHEQLQCWCLNFRGRVTIASVKNFQLVAAPSPPPAGAPTPSQPGPADPEKVILQFGKVARDMFTMDYRYPLSAFQAFAICLSSFDTKLACE

SEQ ID NO: 55113 - protein, 881 aa, Oryza sativa
MNRLVAMEMSKGVESKRKPPSVVARLMGLDDDLPAKEPALQSSRRNLRRSHSLDNLAATNRPQQQQEQHYSRTTPNIHIGPKETVEFKDVYEVSEDPLKRHHILGQNFPWERSSGNKSDTRIEAVRQKFMEAKRLATNENLIHSKQFQEALEVLSSNRELFLKFLEEPSPAFLKQLDGLDTTPAPPPTKRITVLKPIKSVENNGIRETRTHQVINEENELVMGKTHQRSYSADDNFSKSTRIVVLKPSPGKPNRTGARLTARAAPSEQTRRIDFHGGLQDDASILGSRELLHGSVQHMPESRHRRDESLISSTYSNGYGGDESSFSGSEVDYIDEGGSPSDSDAVSPMSRHSWDYIRRHNSPHSASTFSRAHSHSPESSVIREAKKRLSERWAMVSYNEINQEQVPLRRSSTTLGEMLSLQVAKKEEAVAGIISVSSNRSSGTENELAMKDACKSTLREYDENGKSSPRNLAKSKSVPVSSSIFDNVAVNAQSANSEGTPKVFTKSGRAKLSFTGKISSFFFPGNKRPTKEKTSLSSDSSGEIFGCIGHMVPQSDHNLGPDEQMAFCKDEADNSTNHAPCSTKDAGSIEVPVSSDCVSGDVDEVKSNGDLKSIHDETSPTSILDTVFEDSNSNETESSRRTSCTERVALRCPAIDSVARSFSWEDTNSGSPLLGGLKHSNVDDADYDDDELKCYSLVQEIVSSAGLCHLQLSMVFTGWYLPESPLDPALCDKFLDRKEEDAKSRERRSHQKLIFDCVNMALVEIGQDTLLCSYPWSRACLRTWREKLSETLGEEVWNIVSDWLYGDGSFAVNKDDNAGIILERIMQEEVEGKGWIKLLTMETDEITEQIASEVLEDIVTDSVEHLSICCSEHGISMPVANL

SEQ ID NO: 55114 - protein, 316 aa, Oryza sativa
MELRELGATGLRVSPVGFGASPLGHVFGDVPRDVARAAVRRALDLGINFFDTSPYYGGTVSESVLGDCLRAAGVPRDRFVVATKCGRYREGFDFSAARVTRSVDESLARLGLDYVDILHCHDIEFTDLDQIVNETIPVLQKIKESGKARFIGITGLPLSIYTYVLDQVPPGSVDVILSYCHYGINDTALVDLLPYLKSKGVGVISVSPLAMGLLTDNGPPEWHPAPKELKLACRAAADHCKKKGKNITKLAMQYSLMNNEISTVLVGMNSPEQVEENVAAAIELSTSGIDKELLHEVEAILEPVKNMTWSSGIEQA

SEQ ID NO: 55115 - protein, 219 aa, Oryza sativa
MKKSYQRGLNPADMAAVDDDDLLHHHHHPFPPAQLHGGAADHKHDGAGGHHHHHLMQPHHHYDDFPSFDPSMQLPQLMSADQPPPPPPSLLPGVPPSAAAALSSLDVECPQNLMKLTSAAAGGGATGLLHAGGDHRFATAATDWSILDKLLASHQNLDQLFQGRVIAGASSPAAMAAPSHHQHLMDQLAGGGGGTASSLQRLPLQYLGCEAADLLRFSK

SEQ ID NO: 55116 - protein, 537 aa, Oryza sativa
MQCPMDAAASGTSPVMQFHGIVDEPPSHSSPLHTALERSQRHCYGHETPGEFPLAVSPSIVLHVLSTCELDPKDLAALEATCTFFSKPANFEPNFALSLPEVAAFDMCHKRPMVKLMAQQEREQLKQRCGGSWKLVFKYIVARERNYSRIVAGPGHSIVVTTKGDAYSFGANCWGQLGLGDTEDRFKPCLIRSLQSIKITQAAVGSRQTMLVSDTGSVYAFGKGSFVWEELSDAADHITTPKIVESLKGVFVVQAAIGGYFSAFLSREGQVYTISWGRTERLGHSSDPSDVEPRLLSGPLEGVLVAQISAGNCYLLMLAYQPTGMSVYSVGCGLGGKLGHGCKNNKGTPKLIEHFLTLSFNPVSVAAGTWHAAALGDDGRVCTWGWGHTGCLGHGDEEYRVLPTVVQGLSNVKAVHVSTGEYTTFVVSDNGDTYSFGSAESLNIGFQEDEEAADDADFSTPSLVESLKVLNDKAVQISTTNSSYWLNSEMGYPHTFALMESGKLYAFGGGIKGQLGVKLSEGQERAQNPERVPIDLC

SEQ ID NO: 55117 - protein, 620 aa, Oryza sativa
MGSSGEAVAEWGKEGEGGLRHRWRAEAVGASSSFAEGMGEFVLRSMDARFSGSADADGFPSSRHPGFGHSKSTTATSDCSKGQEHVFVRSYSDRLLKCDLTLDMLSENEKIKIIENLVKIQNDGTLEVDVKRSALIAPELSEIDAFGSLSRDIVEAAPGLSKSVPKLKIVILVVGTRGDVQPFIALAKRLQEFGHYVRLATHANFRTFVKSAGIDFYPLGGDPRILAQYMTKNKGFCLAGPTEISVQRKQLKEIIFSVLPACTEPDLDTGLPFRAQAIIANPPALGHLHIAEALGVPLHIFFTFPWTPTNEFPHPLARMPQSATYRLSYLILDLVIWWGTRGFINEFRKKLKLAPIAYFSTYHGSISHLPTGYMWSPHLMPKPNDWGPLVDVVGYCFLNLGTEYQPPQELSQWLQQGPKPIYIGFGSMPLGDEKKVTSVILDALRETGQRGIISRGWGDLGSFSEVPVDVFILEDCPHDWLFPRCAAVVHHGGAGTTAAGLVAGCPTTIVPFFGDQFFWGERIHAQGVGPAPIPIAELTVEALSNAIRFMLDPEVKSRTMELAIAIGNEDGVAAAVDSFHRHLPAELPLAPPPTDVKEEQLDFFQWFSQALEKCCFPFNP

SEQ ID NO: 55118 - protein, 458 aa, Oryza sativa
MDYNPVDSSGTDDDLPPTYQNRGVRGSGRVSGNGRDIVSAVPYNRTKPQTDMETQIHQLEQDAYCSVLRAFKAQSDAISWEKEGLITELRKELRVSDKEHRELLNRVNGDDIIQRIREWRETKGGLQADMVNNAQRSHDRVPSPTTSARKRQKTSQSIPSASVPVPSPAVHSQTLTAPMQPLSSATKKVAPPGTKGKKTKPGQKIPGGSAIKTMSSAGPSGRGPIMNKNLSGGLPTEPISVNPLIGRKVMTRWPDDNSFYEAVITDYDPQLDRYALVYDINTADETWEWVDFKEMAPKDIRWEGGDPGIIQQGRGATVHGGKKSSSRNGPMSGPGRGSRGPQKNTSRKEFPPSQNGVGKKSSDCIEILHTESLIKEVERVFSASNPDPLEMEKAKKVLKEHEQSLIDAIARLAEASDGESEERAQPLQHNRGWRNHHGGNYANDMTIDGHMVGDADAL

SEQ ID NO: 55119 - protein, 500 aa, Oryza sativa
MAANQGEAHRREPDQRRPMCGVCTKPLRLCLCGCLRRPPLDTAVGVTVLQHLMEAGHPLNSTRVARLGLRNLAVALVGDVNHRASFHLRTLDAAAAAGGGNHDRPDGPGEIQVLEGDGFGGGTGGPAGPVQCEGETLDSAICSNGISGESGGAVSCARRDYVTKGINASSDLGVKAANIRGSSDIGGEILDLVDIPDRIGFDLDGEICSVKSDLGGGEELGFQSMKRNGYCSDSERLGSSANQTGNSFVDGIHGENHHSIGEVNGNLPRHLVENASEFQMATAQNCNGIPRENVGTVAAIGQDWTVKNMDKCSITYTEKELKIEIERGVKPKIRWLSRGPLGQSAVSNGFTVTKIQMKKSKQTGEVSVFEEFSITIPPKSALLFPCQRAISIDASDCQLQHLIVLDGTWAKAQRMYHENPWLQLLPHVKLESDGVSLYSEVRHEPRAGCLSTIESIVVAMRKLGEDAKGLDDLLDVFESMIADQRRCKDENWKQKLESKT

SEQ ID NO: 55120 - protein, 448 aa, Oryza sativa
MAAATQPHVMVLPFPAQGHVIPLMELSHRLADQGFKIDFVNTEFNHDRVLKALAEKGAIPGGIRMLSIPDGLDPADDHTDIGKLVQVLPDAMLSPLEKMIRSEKIKWVIVDVSMSWALELATTMGVRIALFSTYSAAIFALRMNLPKLIEDGILDETGNVKKHEMVQLMPPIDAAEIPWVSLGSTQERRRYNIQNVFKTNRLMALAEMIICNTFREIESEALELLSNALPVGPLLAPASGPTGHFLPEDMTCLTWLDTQAPGSVIYVAFGSSTIFDIAQFHELANGLAVSDQPFLWVVRPNFTNGIQEDWFNEYKDRIKGKGLVISWAPQQRVLSHPSIACFMSHCGWNSTMEGVLHGVPFLCWPYFSDQFCNQSYICNVWKTGIKLFRDKQGVVTQEEIKNKAAQLLEDKEIKERAVTLKTTARASIQEGGSSHQNFLELVNLLREQ

SEQ ID NO: 55121 - protein, 752 aa, Oryza sativa
MCEPSGSDDAMVHASEMVDGDEMIHGNEMVVHDSVMIDGNEMVQENVMVHGSGEMVQGSEMVHNNEIIQVNDMIQVNEMVNGDKMAHGHELVGVELTTPTASRRRRKKSVVWEHFTIEEMPGGVSRASCNLCKQTFAYSCGSKISGTSHLKRHITLASCPMLKNEDMKLSLPLATVTNNDGEGCAERVAKRHYRSTGYANAMFDQDRTCSNLAKMIILHDYPLHIVEQRGFTAFIGSLQPRFRVIDVDTIEGQVHSVYQKERENLMHVFSTVPGRISLTVRLWATSQTLGYISLAAQFIDTEWRVHRRMVNFMMVSSPHSENSLSEAISTSLSDWNMKDKLFTITLDNDPSSHDIYSANMINYLSNKKDNIMIKGQLFVVRCYAHILNTVAQDVIASVHSVIYHIRESIKFIKASSVHEDKFAEIALQLEIPSAKTLCLDVTTQWNTTYLMLLAALDYQQVFASLETCDGDYNEAPSTEDWKKVEAACSYLSLLYDSAHNIMAAPNPTSNIFFHEAWKLQSELSNAIAHEDPIFRSTAKIMHERFDKYWKDCNLVLAIAVVMDPRFKMKLVEFSYSKIHSVEAAKYVKVVDDAIHELYSEYATQGEANRDAHVTDNSAAVTPPNGDELLDFDIYLSEIATSQPSISELEQYLEEALMPRIQDFEILEWWKLNTIKFPTLSKMARDVLAIPMSMVSSGSSIFSATATGSQMLDDYRSSLRPETVEALFCAKDWLQYPPATTEAPSTALVKMEN

SEQ ID NO: 55122 - protein, 101 aa, Oryza sativa
MQSVFPQMKPIGILRSLVRHLSYCTPKRMFSLKSFRRTVVHFQDSQGTSLVTVDCCTPNCLSKTTALAWVLNMTGCLMCQRSQRCSKSNHPQDFIRNKLQS

SEQ ID NO: 55123 - protein, 977 aa, Oryza sativa
MDDLEVKNDEEYQMDPIEIKDGEEHSIEMLVEQPRFLEPICPEEVNEDTRVYPRVGDEYQVEIPNLATEEERMKLRSCPVDDSGIFGFDYPVGVGLAIPVTWTQKTSDHVKKEQTGFSGRSSCSSQDECNSHVTEDIPRNVPGCKVECDEHDEKLLKSAEQDINCLQNGKASDYIPLPGMTHYSWTDEEAQTFLLGLYIFGKNLVQVTKFLQCKTMGEVLSYYYGEFFRSDSYNRWAACRKVRSRRCILGLRIFSGTRQQELLSRMLAGIAREVQHPLLEVFKTFNEGTSTFEEFILSLRSTVGARVLVEAVGIGKGKYDLTGFALDPSRNHGISTRAEIPIGKACSSLSSGDIIKFLTGDFRLSKAKSNDLFWEAVWPRLLARGWHSEQPKDSSLVGKHALVFLIPGVKKFSRKKLVRGNHYFDSVSDVLSKVASEPRLLEFGVEGSNGEGGFKIENGWIHDAELEKSTVTDKKSSCYTRPSEPGCSPELMKFTVVDTSVVQGEEPCKVRSLRNLPTDASHGYMSSPHSEDSGSDSSEEHSDSEDSSQSYEHINTNQNKTGAKYVNEKKCKPPTGDRMDIDVLQKNSTFAGTMTSTNGHMSFDQGFSLMNNACSSTATILPVGTQRVHATNSSTEINFQFDQRVTPEPQIFLAASVAKRRRLVSCKNERTGRRNTAANKRQHGKQVDTAQHDVSKSNEASAGAKPFIWGSIPNSSTTINFDMSNIHLCHKQYNVPPTDEKMVLKEKSQDKHVIDLNIPQVPSDYESAVSYIVPSSDKNTHTMDRSIHSSDTNRMDDCLPDINASCNGLLSEQRRQSTRSRPPTTRALEALACGFIGTKQKGAEGNFPSSSRSSRPVRRPRRLTDGAVSFPSDGEGSSSHFTDSAIIVNEWHMTNRQYQVLDNTPTDKSTDNRTRELFGADKSADKGTREFFGADKSADKGTREFFGADKSADKGTREFFGADKSADKGSHELFGIP

SEQ ID NO: 55124 - protein, 229 aa, Oryza sativa
MMTTDALSPPSGPFPDNAEIHKATLLAVNYAILFWGYHSVLEAILLDNGDLFGNCSWYSEKLVVERLIVQIITNLQDELEKKSKLFSDHSLRYLFLLNNSYVVQYQFLVPSDYSPPSEIKFHYEQYQKEYMRASWEPVLSCLHDKMPPCFPKLSSHSELSRFELEFEKTCSHQKLWKVPLPNLRQSLRETIINKIITRYKKYMEDHPEQEKCGRDPLDMEGMVNDLFEG

SEQ ID NO: 55125 - protein, 838 aa, Oryza sativa
MVCHRYESCNSMGLLRLFVCCRRAMKNLIFNFGKEFPELKQYSAFSKIFGGSCLIWLLRSVQELVSLSHKIFEEHTDEMKNTIFSLVDKTSEIFSTLTNMNSVFYLLGAKKQIISSSGESSTPKHDDQAFSILENSALEHVKIMAELLEKSTTGIPVTVKGSQCVIKLENCYDTVCWDRLLCTMSCIRGFLWGLISALEGTCKDYLSSPEERNVMFQYASRFSGCVAKFEAFVDICMHVLFMETKDCELADLISVHLPQELDCENNSLNITAIMDEWTRHQPEEIGFHSDGVLNISTETRGFDLPKVQFVKGFLLENLLSGEGPSIAFTLRELYNASAAIVKLKGILSFPSEVCRQICSPFQKLPLGPMVATAYIALHKLADMSNWPDMFSLLWIDGILSYLEAVGNILALPEINMSKELYTQVVNAHLRAIGKCILLQGKNATLPTHEIGSSTKTLYLQNRSGHVVAKGIINRQNRLNSLKSRLRLSLGKYVNVSSNMHLNTAVQVIERALVGVNRFSHSIYEINTGNCDGGTVSSDVAAGIYCLYLVLETVPGNKRVFKRTVPGLIGALFNIVLHLESPFIFYTERMPVHYPYLHPDAGAIVLMCIEVITAFVGRHSFQIDSCHVSQCLHVPMTLFKGFKHLLSCRNMPHSCNQSEEQLAASNEYILDRQFSVDMYASCCKLLCTTIRHQQREVARCVAVLEDSVNILLSCLESPNPKMVSRAGYFSWNMEESMKCASFFRRIYEEMRQQRELLGKHSMYFLAGYISMYSGQGPFQTGITREIDEALRPGVYSLIDICEESDLQLLHTYLGEGPCRTTFANLVQDYKLHFQYQGKI

SEQ ID NO: 55126 - protein, 581 aa, Oryza sativa
MGNAAAGDSAAELLLRAAALVPPAHYALAALLLACALLYRFLELHLIGDLLRGLRGGRVALTFHPASHVYHRVASKCRSLHGRYLATPWLASPHLQTLFLSISGRPPSFTYRRQLYTVRDGGTIALDWLLASDCEEEDVGFCDGVISRDDSTPLVVVIPGLTSDSTAAYVKHLVFSMASKGWNVVVGNHRGLGGISITSDCFYNAGWTEDFREIVNYLHQKYPQAPLFAVGTSIGANILVKYLGEEGEGTPVAGAVSICSPWDLLVTNRFIQRKLVQRCYDKALAIGLKGYAKLHQPVLARLANWEDIRKSRSIREFDRHATCVVAKYETVDTFYRRCSSANYISNVSVPLLCISALDDPLCTREAIPWDECRANKNIVLATAPNGGHLAFFQGLTAGKLWWVGAVSEFLLALHDSPCMHRQKAQEHSLHTSLESSIDKSPYVNFMEDGMVTAVTNDDANNSDSDNPISNEMELRNGMVGVQQDGIATEIQNECDGNRSQENVTPAQGPVGSQEQPKQNIDKIQDAIAPVKISINQLIRSQGRSVWLLTYIAFVTSWPFLGALGFILFRKKFRNSLPAKRL

SEQ ID NO: 55127 - protein, 652 aa, Oryza sativa
MDRSDSMADSPRRRNGLLRDQVQLVKRKDTNRYEIVRFPDPLSFEKGFFVMIRACQLLVQHNEGMIFVGVAGPSGAGKTVFTEKVLNFMPGVAVISMDNYNDASRIVDGNFDDPRLTDYDTLLENIHGLKEGRSVQVPIYDFKMSCRTGYRTVDVPSSRIVIIEGIYALSEKLRSVLDLRVSVTGGVHFDLVKRVLRDIQRAGQEPEEIIHQISETVYPMYKAFIEPDLQTAHIKIINKFNPFSGFQNPMYILKSPRTITPTDIKVALGEDHTESIEETYDIYLLPPGEDPESCQSYLRMRNREGKYNLMFEEWVTDNPFIISPRITFEVSVRLLGGLMALGYTIAAILKRKSRVFSDGKATVKIDWLEQLNRNYIQVQGRDRNHVKFVAEKLGLDGSYIPRTYIEQIQLEKLINDVMALPEDLKTKLSIDDELVSSPKEALSRVSADKRNKHLKSGLSHSYSTHGDKNIVKLSKLTETNRRFGSGRAPEPPAINQGAITQLSEQISTLNERMDEFTSRVEELNCKFAIKKSSTSQQNLALPNETCNGSAPTNLFVSHLGNGTLIPHSSSSNQLLKESPIVDEINAISRGQRQVIHQLDNLTSLLHEHLALTRQGNAVRRNGILEMDMSICPLIALTIGGFGYLVFKSLNRS

SEQ ID NO: 55128 - protein, 976 aa, Oryza sativa
METLSSVTNIVVGKLFALLEKKYEQWRGLEDSIGFIKRELRVIHGFLHDQLPRDRNGEDPPISAVQATCIDELRDLAHDIEDCLDRFLPCAACERDSSFLRRLAADSRFAGEVERLKSRLEEAHERRANYGVNGVAGSAAAAGGSSSGSANTTDYMAQSCGLVGINVPRQELLDLLLLEDVEGRPERMRVISIVGFGGSGKTTLARAVYDCPDIAGQFDGRAWVVASKHRDDTMGLLSALLGQIRQEDDQRFNQIPQDDEQRFQLQSQVQADIRQHLNAKRYLLVFDDIEEKQWNCIKSTFPTETRSRVLVTTTIKPVANACSHGTGSVYNMRTLNVNHSKDLLQSVLKEYSPELELDLPSILEKCDGLPLALVSVGNFLWRERITECYRNQVCCNLGHHIEKEHAFAELRQVLANNYNTLPGHPLKTCLLYTTVFPNGCSIRRSSLIRRWLAEGYVQCQYPRSSLEVADANLEELMDRNIIRSMDVTNNGRAKNCRAHGIMHEFMLHKSRCDNFIASLHDPDRSKCRHLFLTQSLTSGNQSYMDCGTNPKGKQPRARSLTIFGNAGEFALDYAKCELLRVLDLEECDDLKDDHVKYIYKLLHLKYLGLGSTITYIPRKINKGLHCLQTLDLRKTRINTLPVEIIIMPHLAHLFGKIKIREARGLWVLETNKIEKILSDKSKLQTLAGFVVDKNSLFPRLMVHMNKLRKVKIWCEPAAERNSSISLISAAIQKFTQAGMDTTGAHSLSLRSRKFPNRLLCCLEKSYGYLSSLKLQGELSRFPQFITSLCGLTELCLSSTNLNKEDLSNVCTLHHLLYLKLVESDLQGFIIKNGDFPRMRHLCLVVQNPNLPTVEKGALPHLLSLQLLCKDLVGLSEIKIEYHDYLEEVALDSMVNIETIEIWENEAKKHPNRPKVLFRKRVDPTDAQSTAKYAATERPVPETGCPAVIKKRKFHAIQSYYNGSVETKKSLRCCSGV

SEQ ID NO: 55129 - protein, 94 aa, Oryza sativa; identical to SEQ ID NO: 46643

SEQ ID NO: 55130 - protein, 537 aa, Oryza sativa
MESGGLIAPSETCSSDGRGGGGGGWRAARFLIAVGFLERIGFNGVQGNLVMYLTGPMGMSTAAAAAGANAWGGTVLVLTLVGALAADSRLGRYRAIVAAGVLHLLSLGMLTISSVMQPNHPHPASCHDAAAACSPSPPPPPSLARLVFFHAALYLLALAQGFHNPCSEAFGADQFAASDPGARASRSSYFNWYQFFNSFGYGISNTALSYVEDSVSCTVGFAVCLATTAVYLPIFLLGTRAYRAEQPVDGALLARLAKTSSSAARAWTARVFRRKDTSCTERLLAREEVGEKGFLAKLLPIWVTSIVFAIVSAQEVTLFIKQGSTMDRRIGARGGLVVPPAALQSIVSVIFLTFVPVYDRALVPLARRFTGHPAGITTLQRVGVGMAMSCLAMAVAALVEAKRLRAASDAGLIDRPDATVPMGVWWLVPQYALVGLSKVFGIIGLDEFFYDQVPDDLRSVGLAMSLSVRGVGSYASGVLVSAIDCATRSGGESWFSDNLNRAHLDYFYWILAALAALEVAVFVYIAKRYVYKNKGEP

SEQ ID NO: 55131 - protein, 649 aa, Oryza sativa
MGGSHSREDLDLSDSEDDDSASHASDASSDFATPPPSSSAKPSAAKSSAAAATPASIDAIDRHLRSLHLKYAEPISPNPSPSPTSAAAPAALNAVKLYLHIGGSSPSARWIISDRLAAASFVRAGDDDDDDAPSSGPWCLVVGSKIRARVGPELQLKTFPAQRRVDFVADGVWALKFLHADGYPNFYAKYQSCLFENSYGVAATDEGRAKVFGKDFAAWARPEDGDESIWEDATDGFVPSPSRSPMPSRSPILKPLMEDLREYEEPVEEGGGIQSLALGALDNSFLVGDSGIQVVRNFEHGIHGKGVSVKFSGGSTNFSTPKKALLMRAETNMLLMSPATDGKPHAKGVHQLDIETGKVVSEWKFGKDGADINMRDITNDSKGAQMDPSESTFLGLDDNRLCRWDMRDRRGIVQNIASATESPVLQWTQGHQFSRGTNFQCFASTGDGSIVVGSLDGKVRLYSKSSMRMAKTAFPGLGSPITHVDVTYDGKWILGTTDTYLILICTIFIDKDGKEKTGFGGRMGNRIAAPRLLKLTPLDSHLAGQNNIFREGRFSWVTENGKQERHLVATVGKYSVVWNFLQVKNSHHECYQCQEGLKSCYCYKVIPKDESIVASRFMHEKYAVSDTPEAPLVVATPMKVTSFSISSKH

SEQ ID NO: 55132 - protein, 475 aa, Oryza sativa
MPMAIESWLTKVRSAIISSKPSPSSSSSSSWRSKTVGILALEVATLMSKLVHLWRSLADAALARLRHHLINLDGVRKLVSHHDAALLALACAELTDALRVAAHSVAALATRCADPFLRDFADAFADFADTGRDPHRWVSTWKDMDTRAHKMDKQVAATSALRTAMEDLADAEHGLRKLLQTSSSRRLSATNISLAAEQQQLIFAKKQEVKHLKQTSLWSSTFDAVVSSLARAAFTILARIKLVFGAAHDHRPTTTPLHRSLTLSSAVHPSSVDVQVQPPVSRKSMSMDMGMGEALYLERQRQSGLLERSAAALVPPPGTLGAAALAPRYAWVIISIERMARSPRLVGAEERDELYGMLTASVRAQLRARLSGTVAAAEPGLAGQWRAAVGGILEWLAPMAHATVRWQAERSLEQQRKTTREMETQTLVVQTLQMAERGKVEAAVAELLVGLNYLCRFHKEITTCRTRTCHHDDAP

SEQ ID NO: 55133 - protein, 255 aa, Oryza sativa
MLPPRVAPSSLAAAAAAAPTYLAAAASTPASVWLPVPRGAGAVAVCRAAGKGKEVLSGVVFQPFEELKGELSLVPQAKDQSLARQKFVDECEAAISEQINVEFNASYAYHSLFAYFDRDNVALKGFAKFFKESSDEERDHAEKLMKYQNMRGGRVRLQSIVTPLTEFDHPEKGDALYAMELALALEKLVNEKLHNLHSVASRCNDPQLTDFVESEFLEEQVEAIKKISEYVAQLRRVGKGHGVWHFDQKLLEEEA

SEQ ID NO: 55134 - protein, 771 aa, Oryza sativa
MDEFFIGLESRLRRSVKVADSVMMGLVNAAMEDAYKKSLWKDGDLERLVQKLRFAELAIMQLEWSLRFVRGEMESGSGGGGDGDCHEQLLDDLLETRDRIQARLDEAELAVADKDRDYMLRKHEELASSRREAAVPAVSGRASALRREADDDEERRVFGELKGSVDRQMARMRFRLEDARSTLMALMETVSGEASPMARLQEAGHEGDGVKCLSGFYSMAQLLMEFQEMVLDAGAVSDSVTSSFEFMERSVSSLKEAMDEQQWLANVEKEMYAATINGFLREISAGFPVLNDCSSPGERQPPTENIWEETEHLKEKTEHNQKSLKGDQCGISGSEYLTTTRPAATGQCYSEEPSICHEEVERLIEEKIDSEIRCELQHVLHSEIFRDLVRKLAVLDVQKLTEENGELNIRVELLCEIYTTVFKDLVSKLSSESAEHFIRTFIKDEVEAVIFARTLKEIKSVTEMVRSEKHIKEENNCSFPGEIEKGLEQNIDFNVLRFPDENACTNNLGRFSMIGNIEQLYTMKMQTSGASEDKCTDYYQVPLEKEILSSPGNCDRQDSEENYLLAEISTGKDGVSDAWNGNVEQSLQQQDHRKLHVGDTALNLSIPPEEANTENAEMTLILNEKLDVIHSTGSNSMLAEQDHFDLQMALVSFTGFQEVFMNFEAVTCEKLETAMLRLNYLKKQQGNLIEQMRSLKMSEQSYQIAFIRRCHDLQTAEAEVDLLGDEVELLLGLLRKTYKALDRYSPVLEHYLGVREMLKLLGKELALRHQV

SEQ ID NO: 55135 - protein, 158 aa, Oryza sativa
MLLDDTNPSNGSSPDSELCERLSCSRPVRLPRDGEICPSRALEASKISAILMSALQVMPSHVQQFVPFRHDAERPPSPERPARNWRRTLFSWSMQESVEEAKHSTVSRANPSKSVGNLLLILLHGKWKGLMLLADRVASQWSSQRISGQGHQEFRIKR

SEQ ID NO: 55136 - protein, 594 aa, Oryza sativa
MVANPILLLGPPIAVPDGGGAAAAVQVTWLSGRPLTSGDPCLDFFFQIVPGDTEVARVGDLLDAAWVRDPLTALKLVCHLRAVRGLGKADREGFYAAALWMHDHHPRTLAANLAAFAEFGCFKDLLEIVYRVLHGPRDEHKEEEEEGDDQTESEDGRRRRPRLRFKRRCIDHAEAAKARLQEEAQLAQSVLSRYGSDVSFRFLYDGVADTFAELLKSDVEHMRAGENAKIGLAAKWCPSLRSSYDRATLLCEAIARRMFPRESSQEYLFLSDEHYAYRVRNRLRREVLVPLRKVLELPEVYMTAGKWEQMPYARVPSVAMRQYKGAFEKHDKSGVAGFLDEVRTGHARLHVGAAMPHELVAAALKGEHDEAAELQWRRMVSALAAGGRLSNCIAVCGLSSGGDVAKPPGAAAVALGLLISELSQDPWKGRVITFDATQQLHKVCGATLVEKLRSLAAPVRAAPKGSSLNLQGVFDRILTVATYGGLAKDMMVRRVFVLSDMELNASAWRVQDELKTIRSKFTAEGFTAPEVVFWNVGAPASAPVVATEANAAVVSGYSKNLVRLFLEWDGQLTPAAVMADAISGPEYDSLEVVD

SEQ ID NO: 55137 - protein, 739 aa, Oryza sativa
MGGGGGGGFFVLLMLGAVYTLHATALPSPAPHPSGSPDTRILGPRISPAFSPRAMSPESTGGPVHPPSHKHHRRPYHPHSPSPSPLPQGCTDNCSDPMTTTPIGSPCGCVLPICVIVDLDVAPYLLFMRIAELEVEVAAGTFLKQSQVKIMAAIPSIQDDQKTRVTIYLVPLREQFDGYTASLISDRFWNNKIQINSSIFGDYEVINVTYPGLRSPPPSLPETSHGSDPTGTGEDPITADVHHGKNKKLDSWIIVVVAGSSITLIAACIGLGVLLLKWYKLRQLQEAVSPATTPAVNRRYGGRSTLSVSRVSSASASMLSTVATCTTSVKTFSLSQLEKATDGFDSKRVLGQGGFGRVYHGTMDGGDEIAVKLLTREDRSGDREFIAEVEMLSRLHHRNLVKLIGICIEHNKRCLVYELIRNGSVESHLHGADKAKGMLNWDVRMKTALGAARGLAYLHEDSNPHVIHRDFKGSNILLEEDFTPKVTDFGLAREATNGIQPISTRVMGTFGYVAPEYAMTGHLLVKSDVYSYGVVLLELLSGRKPVCMSDTNGPQNLVTWARPLLCHKEGLERLIDPSLNGNFNFDDVAKVASIASMCVHNDPSQRPFMGEVVQALKLIYNDAEAACDDSYSHRDSSCDQYDDYHGALALDSGSGSWWNRSSNPSGFFDNRNPLPVITMEYSSGRIEGARDPRFALSTGGHAQSPALQNRSGPIRMKKKLASFYRSRGSFSEHGQLPRH

SEQ ID NO: 55138 - protein, 495 aa, Oryza sativa
MATAVRLLRRSLRGGEAAPRFLSASQNLVRLVANNTRSVDVGQPTPRSHPELLAEGEITPGITSDEYIFRRKKLLEVLPEKSLAIIASAEQQMMTDVVPYSFRQNGDYLYITGCAQPGGVAVLSEETGLCMFMPDTSKEDVVWQGQTAGVEAAENFFKADKAFPLSEMQKILPEMIERSKVVYHNVKTLSPSYKNLDSFRRASLNNKVKDIAYYTDELRWIKSKSEIGLMRESASIVSQSLLQTMLLSRTHREESQLAAKIEYECKMRGAQRMAFHPVVGGGANGSVIHYSRNDGRVKAGELLLMDVGCEYHGYLSDLTRTWPPCGRFSPAQEELYSLILETNKECIKLCKPGASINEIHNHSVKMLIKGFQELGILEKGKSIQYNYLNPTAIGHSLGMDIHDSVKLSKDKPLEPGVIITIEPGVYIPPVPILKENAPDRYRGIGIRIEDEVLITESGHEVLTASVPKEISHITTLMNMGSNSMMDAHELRAACS

SEQ ID NO: 55139 - protein, 710 aa, Oryza sativa
MRIMIKGGVWKNTEDEILKAAVMKYGKNQWARISSLLVRKSAKQCKARWYEWLDPSIKKTEWTREEDEKLLHLAKLMPTQWRTIAPIVGRTPSQCLERYEKLLDAACAKDENYEPNDDPRKLRPGEIDPNPESKPARPDPVDMDEDEKEMLSEARARLANTRGKKAKRKAREKQLEEARRLASLQKRRELKAAGIDTRQRKRKRKGIDYNAEIPFEKRPPPGFYDTVGEDRPLEHVQFPTTIEELEGKRRVDIEAQLRKQDIARNKILQRQDAPAAIMQANRLNDPEAVTKRSKLMLPPPQISDHELEEIAKMGNAGDPSLVEELGEGSTATRALLSSYSQTPRLGMTPLRTPQRTPAGKGDAIMMEAENLARLRESQTPLLGGDNPELHPSDFSGVTPRKKEMQTPNPMATPLASPGPGATPRIGMTPSRDGSSFGLTPKSTPFRDELRINEEVDMQDTAKLELRRQAELRKSLRSGFASIPQPKNEYQIVMPPITEEEKEEAEEKIEDMSDRLARERAEEQARQEALLRKRSKVLQRSLPRPPAASIEILRQTLIKGGESRSRSTFVPPTSLEQADELINEELLRLLEHDNAKYPLDEKTQKDKKKGSKRQANGTPSVPEIEDFDEDELKEANSMLEEEVQYLRVAMGHESESLEDFVKAHDACQEDLMFFPNNNSYGLASVAGNSDKIAALQYEFEIVKKRMDDEAK

SEQ ID NO: 55140 - protein, 699 aa, Oryza sativa
MVVSVSLPCWTEITHYYSPSPWERTWIELLFAHAGNTPMDRRLILSVAVAVALLAPRAAGEPWPVCGQDFGTFTPKSRFFANLQLIAATLPGNASSSPDLYATAVDVGAVPEQVTAAALCRGDVSASSCLGCLTQAFADLPNACGNSREAATYYDRCMVSYSAINFLSGGAGGEDPARIDAYTVNNENKVTSEQGRYNRLVAALVNATADYAAYNSTRRYAAGEADFDAALPKVYSLAQCTPDLSPARCRSCLAKIVAQELWSYKDDIGGRTLSVRCSFRIETKPFLNGTTMVRLPATSAPSPAPPVNATPSAATPGRETKYKVPRLVLIILLPIIAAVNLVVCFCVWRRKRPVITKAKQTNANYYAEADDVDSVDSMLMDISTLRAATGDFAESNKLGEGGFGAVYKGVLPDGNEIAVKRLSKSSTQGVQELKNELALVAKLRHKNLVSFVGVCLDQHERLLVYEFVPNRSLDLILFDTEKREKLDWEKRYRIINGVARGLQYLHEDSQLKVVHRDLKASNILLDANMNPKISNFGLARIFGQDQTQAVTNRVVDTYGYMAPEYMMRGNYSVKSDAFSFGVMVLEIVTGRKNNDFYNNSHQSEDLLNTIWERWMAGTVDEMVDPAMSRYVSASDVRKCVHVALLCVQENPADRPVMSSVVMMLDSETVSLQVPSKPAFFARNGGAKPGVASDESTASV

SEQ ID NO: 55141 - protein, 64 aa, Oryza sativa
MTELDKLKKDCEDMEAENSQLMDEMVQSEGSSVIATLSVKIDTSKDRHGSSSQLNKHTNDDSKG

SEQ ID NO: 55142 - protein, 1035 aa, Oryza sativa
MARAMMLLLFCSYALALVSAGSSSSSNATADELALLSFKSMLSSPSLGLMASWNSSSHFCSWTGVSCSRQQPEKVIALQMNSCGLSGRISPFLGNLSFLKTLDLGNNQLVGQIPSELGHLSKLRMLNLSTNLLRGSIPVEMRGCTKLMTLHLGNNQLQGEIPAEIGSSLKNLINLYLTRNLLSGEIPQSLAELPSLELLSLSHNKLSGEVPSALSNLTNLLNIRFSNNMLSGVIPSSLGMLPNLYELSLGFNNLSGPIPTSFWNISSLRALSVQGNMLSGTIPANAFETLPHLEELYMDHNHLHGKIPVSLGNSSNLSMIILGANLFNGIVPQEIGRLRKLEQLVLTQTLVGAKEQKDWEFITALANCSQLQVLVLGMCEFGGVLPNSLSSLSTSLKYLSLSYNNILGSIPKDIGNLFNLQVLDLAWNSFIGTLPSSLGRLKNLHYFNVYNNDLGGPIPSTIGNLTELITLYLMSNTFSGRLTNSLANLTKLTELDLSSNNFIGPIPSGLFNITTLSIALELSYNKFEGSIPQEIGNLVNLVKFNAESNKLSGEIPSTLGQCQNLQDLTLQNNMLNGNIPEQLSQLKSLQTLDFSRNNLSGEIPIFIENFTMLSYLNLSFNIFTGEVPTTGIFTNSTAISIQHNGRLCGGITTLHLPPCSSQLPKNKHKPVVIPIVISLVATLAVLSLLYILFAWHKKIQTEIPSTTSMRGHPLVSYSQLVKATDEFSIANLLGSGSFGSVYKGELVAQIGESPYYVAVKVLKLQTSGALKSFAAECNALRNLRHRNLVKIITACSSIDNSGNDFKAIVFDFMPNGSLEGWLHPDKDDQIDHKYLNLLERVGILLDVANALDYLHCHGPTPVVHCDLKPSNVLLDAEMVAHLGDFGLAKIIVEGNSLLQQSTSSMGFRGTIGYAPPEYGAGNTVSTLGDIYSYGILVLEMVTGKRPIDNKSIQGLSLREYVELGLHGKMMDVVDTQLFLGLENEFQTADDSSCKGGINCLVALLRLGLYCSQEMPSNRMLTGDIIKELSSIKQSL

SEQ ID NO: 55143 - protein, 637 aa, Oryza sativa
MSDGNDFAELLWENGQAVVHGRKKHPQPAFPPFGFFGGTGGGGGGSSSRAQERQPGGIDAFAKVGGGFGALGMAPAVHDFASGFGATTQDNGDDDTVPWIHYPIIDDEDAAAPAALAAADYGSDFFSELQAAAAAAAAAAPPTDLASLPASNHNGATNNRNAPVATTTTREPSKESHGGLSVPTTRAEPQPQPQLAAAKLPRSSGSGGGEGVMNFSLFSRPAVLARATLESAQRTQGTDNKASNVTASNRVESTVVQTASGPRSAPAFADQRAAAWPPQPKEMPFASTAAAPMAPAVNLHHEMGRDRAGRTMPVHKTEARKAPEATVATSSVCSGNGAGSDELWRQQKRKCQAQAECSASQDDDLDDEPGVLRKSGTRSTKRSRTAEVHNLSERRRRDRINEKMRALQELIPNCNKIDKASMLDEAIEYLKTLQLQVQMMSMGTGLCIPPMLLPTAMQHLQIPPMAHFPHLGMGLGYGMGVFDMSNTGALQMPPMPGAHFPCPMIPGASPQGLGIPGTSTMPMFGVPGQTIPSSASSVPPFASLAGLPVRPSGVPQVSGAMANMVQDQQQGIANQQQQCLNKEAIQGANPGDSQMQIIMQGDNENFRIPSSAQTKSSQFSDGTGKGTNARERDGAET

SEQ ID NO: 55144 - protein, 325 aa, Oryza sativa
MLSLRPPCTLSPAPWRRRRTLHGAAGTPQRVSVAAPSAIVEAVSPPARFSFPILVNGCTGKMGLSVAEAVTSSGLHLVPISFSSRDTLDRTVRVGHTDVRIYGPSAREDVLSSVIDEFPDVVVVDYTAPDSVNANAELYCKLGLPFVMGTTGGDRQLLYKSVQDSNNYALISPQMGKQVVAFLAAMEIMAEQFPGAFSGYHLEVLESHQAGKLDISGTAKAVIACFEKLGVSYDMNRMVKIRDPEQQLEMVGVPEEHIEGHAFHLYHLTSPDDSVSFEFQHNVCGRSIYAEGSVDAAMFLHRKVRSNDSKRIYDMIDVLREGSMR

SEQ ID NO: 55145 - protein, 503 aa, Oryza sativa
MAALHLHALIAGGGGATTVPHLRQIHAHLLTSGRFPSLGPVLLRRLISLPNPHLHLAHRLLLSLPSPSLDLFNLLLPPLASSPDPSTAAALFLRLRRGGLRPDAHTLPHVLKALARLAPGSLPVVGSVHSEAVKDGLASAVVYVPNALMAAYSACGQLERAVQVFDEMPRRTVVSWNTALTACAGNGRHELCVELFAEMLEAGSVPDPTTFVVMLSAAAELGNLALGKWAHGQVVSRRLDMTLQLGTAAVNMYSKCATVSYALRLFERMPARNVWTWTAMIVGFAQNGLAQEALELFDRMKLSKIIPNYVTFLGLLCACSHAGLVDEGRRFFHEMQHVYGIVPMMTHYSAMVDVLGRNGLLQEAYDFVVGMPVEADPVVWRTLLAACQLHSSKDCIEIIDKVQGKLLELEPRRSGNYVMVSNIYCEIGSWDEAAKARRVMREGGMKKVAGESCVEVGGRVHRFIFGDDSCPEFHGACRILHELNLNMRKCEPIDPILFTDDAD

SEQ ID NO: 55146 - protein, 1115 aa, Oryza sativa
MSFRSLIRSDPTQALASWGNQSIPMCQWRGVACGLSGRRTGRVVALDLTKLNLVGAISPLLGNLTYLRRLHLHKNRLHGEIPSELGHLRDLRHLNRSYNSIQGPIPATLSTCRGMENIWLYSNKLQGQIPSEFGSLQNLQALVLGENRLTGSIPSFIGSLANLKFLILEENNFTGEIPSDIGRLANLTVLGLGSNQLSGPIPASIGNLSALQFLSVFSNNLVGSIPPMQHLSSLEFFELGKNNIEGSIPTWLGNLSSLLTVKLGGNRLDGNIPESLGKLKLLTSLDLSSNNLVGPVPDTIGNLYSIKQFHVENNELEGSLPSSIFNLSSLEELNLQTNNLNGTIPLDLGNRLPKLQLFLISENQFHGSIPPSLCNISTLRWIQTVNNSLSGTIPQCIGINQKSLYSVTFAVNQFETSNKYGWSFMSSLTNCSNLRLLDVGDNKLTGELPNSIGNLSTRLEYFVTNYNSMTGKIPEGLGNLVSLKFIEMNNNFYEGTIPDSLGKLKNLNRLYLTNNNLSGSIPSSIGNLRMLTLLSVAGNALSGEIPPSLSNCPLEQLKLSYNNLTGLIPKELFAISVLSTSLILDHNFITGPLPSEVGNLTNLALLDFSSNLISGEIPSSIGECQSLQYLNTSGNLLQGQIPPSLDQPKGLLLLDLSHNNLSGSIPKFLGTMTGLASLNLSFNNFEGDVPKDGIFSNATPALIEGNNGLCNGIPQLKLPPCSHQTTKHKKQTWKIAMAISICSTVLFMAVVATSFVFHKRAKKTNANRQTSLIKEQHMRVSYTELAEATKGFTSENLIGAGSFGSVYKGRMKINDQQVAVAVKVFNLKQRGSSKSFAAECETLRCVRHRNLVKVLTVCSSIDFQGRDFKAIVYKFLPNRNLDQWLHQNIMEDGEHKALDLITRLEIAIDVASSLEYLHQYKASPIIHCDLKPSNVLLDDEMVAHVGDFGLARFLHQDPEQSSGWASMRGTTGYAAPEYGLGNEVSIHGDVYSYGILLLEMFSGKRPTDSEFGESLGLHNYVNMALPDRTASVIDLSLLEETVDGEAKTSKSNQTREMRIACITSILHVGVSCSVETPTDRMPIGDALKELQRIRDKFHRELQGAGATNHQDIQIC

SEQ ID NO: 55147 - protein, 110 aa, Oryza sativa
MAVSALLPPIAAAPPLAGSTLSFGVPYQNKRRILTMRVYCAADEGEISPLLPSSCRYVPTCSEYSMQAYKKYGVAKGTILTAWRLCRCNPLGGHGYDPPRWFDEEELPKQ

SEQ ID NO: 55148 - protein, 131 aa, Oryza sativa
MEAALEADVPAPHGDADEEEVGLRGDDGGLGGELLGVQSRAVDAYVGDARRRRRPRGYLDGVAAPGLGHGGGGVAVVGHESTDVEEDPRCSRRSAVGRRLQGFLHDRPLRPVISSSHAATPTSDSVDFPGI

SEQ ID NO: 55149 - protein, 106 aa, Oryza sativa
MECPFTQQVWRDIGRKIRLSRFLNMTIDDTLLNWWREQTDEAEKLQQKRLRSVFLATFWEIWIERNNCIFRGTESTPPALASKIIDELHLWEMAGAKGVQCIMLRE

SEQ ID NO: 55150 - protein, 585 aa, Oryza sativa
MSEQPLPQPRSSMREALEKEDKEKAAAAKEKAAVPKNGGNGGGGKNGGGNGGGNGGAGAQPGEETTREIQVVREAYRREPAAPAYVMPEEPPAMVELVGWYLYGFCSYFITHLLLPVLFPAIITQVAFPASDFTPDTKYIVKGATCSIHEMSMYQRLTKHSIAIDGSRLSPLGWSGLSWAIGILIAAPILTQAAHHLDRGQYQSLILIAATSFGSFFCLLTGFFKTVWVFLFYILFIGASIIVAEAVHTRNLGLMIRGLAAHDSGKHFVLRRRAAASQLTLYCTAIGGIGAALMAAFMYHMLRRTDQLTGLWVVSIFSGLIWFIGICHGLFTNRPSSSSPTTAFEPNFFTKLSYSMTLVRYPQAIGSLVAVFLSSFATMCIFTSGTLYAIGGVCIKPVLVLVLWILYFLFPLISLPLLHPIQIIIRADAVRMQLLGFIICLFVSGAGFYFKSHRWRAAHIIVIALVQSTANGVLYSFGRILLLDASPPGKEGAFAVWYAFVRCIGAMIGFAAASAGPGRAGGSFAAAFLGSFLGIIVLIFGNVSNIGALKAAGHLKGMEDEKRLGMEKGEGMSAVADSGEGRGRV

SEQ ID NO: 55151 - protein, 64 aa, Oryza sativa
MNVTPCTTLHVSSYSILILSKSQQSGIVQPAASRKKNWLQIPRIMLPMTACMVVTVFCVTSSSW

SEQ ID NO: 55152 - protein, 117 aa, Oryza sativa
MNHPSSAATATVLLLLALLGVAAGGGEDGQKRAAGVYIVIVQPPADGADTVAYHTCILAAALGSEERAKEALLYSYRAVASGFAAKLTPPELSALQKHPAVLQVRPDQMYHAVDNLN

SEQ ID NO: 55153 - protein, 945 aa, Oryza sativa
MGAIGGDEVVQWDKMDGGEVVNGGGGGGVGKLERILVSVRLRPLSDKEIARGDPSEWECINDTTIISRSTFPDRPSAPTAYSFDRVFRSDCDTNEVYKQGAKEVALSVVSGINSSIFAYGQTSSGKTYTMTGITEYTVADIYDYIGKHEERAFVLKFSAIEIYNEVVRDLLSAENTPLRLWDDAEKGTYVENLTEVVLRDWNHLKELISVCEAQRKTGETYLNENSSRSHQILKLTIESSAREFLGKDKSTTLVASVNFVDLAGSERASQALSAGARLKEGCHINRSLLTLGTVIRKLSKVRNGHIPYRDSKLTRILQPSLGGNARTAIICTMSPARSHMEQSRNTLLFASCAKEVVTNAQVNVVMSDKALVKQLQKELARLESELRCPASYSSLESLVKEKDNQIRKMEKEIKELKLQRDLAQSRLQDLLQVVGDNHVHVSKQSSVSGRNFTFDVPQTCEDEQSTTESSEVVDSVQNFRFQGRRVAQREHKPQQAENNVQFTTPSRYSVSSPPFSGMLPTNRSDHLSQISNEDSDDICKEVRCIETNETGGNECLESSAVGSNSLQDPNAGSSMHINNDSNSSMNSRLRDESPVTLEQHLENVRKPFANIVKDLGSSTRNSSSSKVLGRSRSCRSLTGSSLFEDLEKDDCTPPNRSFIDFAGRPQNCQRRGSALNYDAESETLSRAGSMLSEITTTRDGLKANSSVAGDTEFTGIGEFVAELKEMAQVQYQKQLGHSGNGDLAEGTIRSVGLDPITDALQSPSRWPLEFEKKQQEIIDFWHACNVSLVHRTYFFLLFKGDPADSIYMEVELRRLSFLKDTYSNGAIASIPNTSLVSSAKKLQREREMLCRQMQRRLSIEERESMYTKWGVSLASKRRRLQVARCLWTETKDLEHVRESASLVARLIGLLEPGKALREMFGLSFAPQQFTRRSYNSWRYGRSSLN

SEQ ID NO: 55154 - protein, 417 aa, Oryza sativa
MFGRAPKKSDNTKYYEILGVPKTASQDDLKKAYRKAAIKNHPDKGGDPEKFKELAQAYEVLSDPEKREIYDQYGEDALKEGMGGGGSHVDPFDIFSSFFGPSFGGGGSSRGRRQRRGEDVIHPLKVSLEDLYNGTSKKLSLSRNVLCAKCKGKGSKSGASMRCPGCQGSGMKITIRQLGPSMIQQMQQPCNECKGTGESINEKDRCPGCKGEKVIQEKKVLEVHVEKGMQHNQKITFPGEADEAPDTVTGDIVFVLQQKDHSKFKRKGDDLFYEHTLSLTEALCGFQFVLTHLDNRQLLIKSNPGEVVKPDQFKAINDEGMPMYQRPFMKGKLYIHFAVEFPDSLAPEQCKALEAVLPPKPASQLTEMEIDECEETTMHDVNNIEEEMRRKAQAAQEAYDEDDEMPGGAQRVQCAQQ

SEQ ID NO: 55155 - protein, 350 aa, Oryza sativa
MDDIDDEYDDDDDDDLNMRDATPEPDELDQDIVESDLELEGDIVESDHQDPPQKMGDPSIDVTEENRDASQEAKSKAMEAMSEGKLEEAIDHLTKAILLNPLSAIMYGTRASVFIKMKKPVAAIRDANAALEINPDSAKGYKTRGMAYAMLGKWEEAAHDLHTASNMDYDDEINAVLKKVEPNAHKIMEHRRKYERLRKEREEKRAERDRFHRRAEAQAAYDKAKRKEQSSSRSSGGASPRGGFPGGMPGGGFPGGMPGGGFPGGMPGGGFPGGMPGGFPGGAMPGGVPGNVDMSKILNDPDLMAAFGDPEVMAALQDVMNNPASFARHQANPKVGPIIAKMMAKFNGSQ

SEQ ID NO: 55156 - protein, 264 aa, Oryza sativa
MILDKPLADIGGKGLFTKEIDDALLQGRIDIAVHSMKDVPTYLPEGTILPCNLPREDVRDAFICLTASSLAELPAGSVVGSASLRRQSQILYKYPSLKVVNFRGNVQTRLRKLKEGDVHATLLALAGLKRLNMAETATSVLSVDEMLPAVAQGAIGIACRSSDDTMMNYLSSLNHEDTRLAVACEREFLSVLDGNCRTPIAAYASRDKDGNCSFRGLLASPDGSTVYETSRTGPYDFDIMVEMGKDAGHELKAKAGPGFFDSLQ

SEQ ID NO: 55157 - protein, 862 aa, Oryza sativa
MEKNNVPHTFWSSYLPSLIQQKGIAKRIASILSGYGLIAYQLGNHDSVLNHNEQHEKFDAHRLNSTGSHPKGGLAHKLSGFRALAAGAPRSGQQHLIRCLLHGFVGHTVIHKLDLATMAQEGNGDILSGLTQILLKCLNLGRCIIYMPRIDLWAIDKFHEQEAEDHVLNVGTSKLGSTATKNIKKCSEVWNSLVDQMGSLLASVSISVLSTSELKFQDLPSGVRHFFSTHVVDQCLASSEHTIPRFSVNVDSYFTWDEVIDACCLRISHDLVQQHVQLLHDRAHNNHDEQKEVFVPMEISAPGEHRSSGSKEASMLTKYPLNMDKHPSCGVSSREHPTQLGTCSAQQEPPTSNVEDKEDNTEKIDFNEKVATNRSNRIVKDSESLAIMAFGIQILQHPQFSKLCWVTSKLREGPCTDINGPWKGWPFNSCLLQSTTADKSLSGGNNVLKGKEKIPSVRGLVAVGLLAYRGAYASVLEICSEVRKVLELLVGQVRTKILEKRSRYRYFHILSQVAYLDDIMSSWAYTFQRLHSENRRVKTSPKVTVGKSSTRECQGDSNTAEANILGAPAGCSEAQGTPGQHTDDLEVIPAHCPSEMQENSVQHAPGHLEIHGIVCDLDNDNVTSISSINAVEPDLIHSASLDVHTDSLTPADAVINDGQSCGVDNDGQMSRVINGEENHISNIERPESHTVSVADFNELQRKNAVASSTSTDSAGTSRNMVSSEARGSDNERNTDFPVDDVKLGHLVNPQSQDTMKSLSVLKPPCLYKCCPVCFNAVYKMVHDILSNSVRPSLHCLAVDDMHDLLSSWSVNLLATVRKWYTSQGIVGSEENSGEGHCVCSSDNGWFQGSAHAIWKATKMLEL

SEQ ID NO: 55158 - protein, 413 aa, Oryza sativa
MGNCGTREENAVVAAHAQVQQLHLLQHPVKNAVAERKHTRISSDMSDPSTPRKIEDAKNISIYNDVIDFTLFELETITRSFRADYVLGEGGFGTVYKGYIDENVRVGLKSLPVAVKVLNKDGHQGHREWLTEVRFLGQLRHPNLVKLIGYCCEDDHRLLVYEFMFRGSLENHLFRRTATPLSWATRMSIALGAAKGLACLHNAERPIIYRDFKTSNILLDSDYTAKLSDFGLAKAGPEGDQTHVSTRVMGTYGYAAPEYVMTGHLTARSDVYSFGVVLLELLTGRKSIDKSRPSREHSLVDWALPKLNDKRRLLQIIDPKLEGQYSVRAAHKACSLAYYCLSQNPKARPLMSDVVETLEPLQGSGGSDGAVQSVLGSGLPSYRVNRRLMTNRVHCRALPNPKCSPAVPACRVR

SEQ ID NO: 55159 - protein, 646 aa, Oryza sativa
MDISHLLLRFFLLLLLLLLAFSLDDAPHHHCTEAAATTLPPPPPPPFSFKFDFSNTYTYRLEDLRFEGTAAVHGATVDLTCNVAQCTTGRMSYGRAVPLWDRATNEVASFATEFAFKIVTPDNVARGDGMAFFLSSYPSRVPPNPSGQSFGLIAGDADHAGDGPDRFIAVEFDTYDDTFERPRPAGDHIGIDVSSVADSINTTSLNFSRNGAMRASITFDNVTRMLVATVQFTDQTTASRAAPVQVSAKLGDPRALLPSEVAVGFSTANGATFQLDQILSWSFNSTLASPHPVTKGHHKKKGAAGKFAIVGAPIFLLLVWSILSWWKWRSSSRDIDKRTGGVRQFKYNELAAATNQFSSENRLIGAGPFGEGYKGFFKEMGRHVAIKKISKESRSEGSNKDFYDEVKTISSAKHKNLVELVGWCVKRRWNMFDSMCWCREKAHTIFLVYEFVDNSNLRVHLHEKEAVLPWTTRYKIVKDICAALVHLHHERRPFVLHRNIKPNNILLDKEFNAKLADFGLSRTADKVGKARYLDPECKKTGKFKRSSDVYSFGIVLLEIACKKDENSFAKVWSRYLEKSLMQVADDRLRGEFDERQMERVIILGLWCCQPNIDMRPTVQQAMDFLESDGPLPELAEPETSSSKIGN

SEQ ID NO: 55160 - protein, 327 aa, Oryza sativa; identical to SEQ ID NO: 35670

SEQ ID NO: 55161 - protein, 453 aa, Oryza sativa
MGGEEGMAAGRKKRVGRYEVGRTIGQGTFAKVKFAVDADTGAAVAMKVLDKDTILNHRMLHQIKREISIMKIVRHPNIVRLNEVLAGKTKIYIILELITGGELFDKIARQGKLRENEARKYFQQLIDAINYCHSKGVYHRDLKPENLLLDSRGNLKVSDFGLSTLAQKGVGLLHTTCGTPNYVAPEVLSNNGYDGSAADVWSCGVILYVLMAGYLPFEEDDLPTLYDKITAGQFSCPYWFSPGATSLIHRILDPNPKTRITIEQIREDTWFKKTYVAIKRGEDENVDLDDVQAVFDNIEDKYVSEQVTHNDGGPLVVNAFEMITLSQGLDLSALFDRQQEFVKRQTRLVSRKPAKTIVATIEVVAETMGLKVHSQNYKLRLEGVSSNRMSPFAVVLQVFEVAPSLFMVDVRKVAGDTLEYHRFYKNLCNKMESIIWRPIEVSAKSALLRTATC

SEQ ID NO: 55162 - protein, 408 aa, Oryza sativa
MQAAAAWRRHLLDGNISPTTAAAISAFRSASQPALAPQGLGGADGARYMSARAPAVKGTGHLVRKGTGGRSPVSGIIATVFGATGFLGRYLVQQLAKMGSQVLVPFRGSEDCHRHLKLMGDLGQIVPMKYNPRDVDSIKAVMAKSNVVINLIGREYETRNYGFDEVNHHMAEQLAMISKEHGGIMRFIQVSSLGASASSPSRMLRAKAAGEESVLKEFPEATIMRPATMIGTEDRILNRWAQFAKNWGFLPLVDSGSTKIQPVYVVDVAAAIVNSLKDDGTSMGKTYELGGPEIYTVHELAELMYETIREWPRYIDVPLPIARAIASPREMLLNKVPFPLPTPSIFNKDQINAFSVDTLVSDNALTFSDLGIVPHKLKGYPVEFLVCYRKGGPAFGSTVSEKIRSSEL

SEQ ID NO: 55163 - protein, 54 aa, Oryza sativa
MDLYLSLDSGTNVHRINFDSCNAKLLTSKARVAHSNSSFLFCFSVNNGALVHRM

SEQ ID NO: 55164 - protein, 319 aa, Oryza sativa
MGDGGELAAEKHVRYIVTVEKRKDSFESLVMEHIRLNGAYWGLTTLDLLHKLRAVEADEVIEWIMSCYHPESGGFGGNVGHDAHVLYTLSAVQVLCLFDRLDALDVDKVADYIAGLQNEDGSFSGDIWGEVDTRFSYIAICTLSLLHRLEKINVQKAVDYIVSCKNLDGGFGAMPGGESHAGQIFCCVGALAITGSLHHIDRDLLGWWLCERQCKEGGLNGRPEKLADVCYSWWVLSSLIMIDRVHWIDKDKLAKFILNCQDKENGGISDRPDNAVDIYHTYFGVAGLSLMEYPGVKPMDPAYALPLDVVNRIFLRKEH

SEQ ID NO: 55165 - protein, 231 aa, Oryza sativa
MARVHHKNGRGGGGGGGGGKGKGKGKWKMPASVARKQQAAMANVDQVTGDKIPKSFVFSRGKLPSTLRHLQQDLRKVMLPYTALNLKEKKRNNLKDFVNVSGPLGVTHFFILTNPKSSPHLRMAKTPQGPTYTFQIKEYALAADIANSQKRPRCPPEIFKNSPLVYICRGFVFSPPCLGGVMIVIVRMLLGGIVIAFVWNHGLADCTQWLWRSWRAFQEFGRIFSAYDPCY

SEQ ID NO: 55166 - protein, 581 aa, Oryza sativa
MAEPGEDAAAAAAAASTKYVLITGGVVSGLGKGVTASSVGVVLKACGLRVTCIKIDPYLNTDAGTMSPFEHGEVFVLDDGGEVDLDLGNYERFLDVTLTRDNNITTGKIYQSVIEKERKGDYLGKTVQVVPHVTDEIKQWIQSVSSVPVDGQTRPADVCVIELGGTVGDIESMPFIEALRQLSFSLGKDNFCLIHVSLVPVLGVVGEQKTKPTQHSVRELRALGLTPDLLACRSAQPLIGSVKEKLSQFCHVPVENILNIHDVPNLWHVPLILRNQKVHEAIIKQLNLGRSAGPPELRDRTQMAESYDDLKNSVKIALVGKYTNLTDSYLSVVKALLHASVACSLKPSIQWIAASDLEDATATSAPDAHAKAWETLKGSSCILIPGGFGDRGISGMILAAKYARENKVPYLGICLGMQISVIEMSRNVLGLKDADSEEFNSETPFRVVMYMPEVSKTHMGNTMRLGCRRTFFRRTDCLTSKLYGSPEHVDERHRHRYEVNPSFVAMLENAGLHFVGCDESGKRMEVVELQDHPFYIGVQFHPEFKSRPRRPSPPFTGLILAAAEYMGTPANNSNGHVGTSE

SEQ ID NO: 55167 - protein, 369 aa, Oryza sativa
MSNLSEPSKEAVSADDSSAVQKTGAWSNTLNILLQQTSVYGVAAGYCLSASLLSIINKWAVMKFPYPGALTALQYFTSVVGVLLCGQLKLIEHDGLNLRTMWKFLPAAVMFYISIFTNSELLLHANVDTFIVFRSAVPIFVAIGETFYLHQPWPSLKTWLSLSTILGGSVIYVFTDNQFTVTAYTWAVAYLASMSIDFVYIKHVVMTIGLNTWGLVLYNNLEAFMLFPLEMLLTGELNQMKGDNAKVTNWLSSDVILPVALSCLFGLSISFFGFSCRRAISATGFTVLGIVNKLLTVVINLLIWDKHASFVGTIGLLICMSGSVLYQQSTTKPKAPKAEPKEENDEEQQKLLEMQQGHESSSTQKQTSS

SEQ ID NO: 55168 - protein, 338 aa, Oryza sativa
MAPSKQQQMLLKKVMAKKPKTKRLSGFGLKPSAAFSRPHVPSAAASLQPSRRVRVVFEDPDATDSDSDDDEDAGAASKKRYFELFIGKPASSTKQASPASTVAAYANIGKVGSTCYRGVRLRKWGKWAAEIRNPFTGHRAWLGTFDTADAASAAYQSASRNFAEEKRRRGVASSASPASSATPTPTASSSSSTSAAPFAHPSPSSVLEATKPAPKPESPPLPEQAATPLLVEATNETAELPDDPEFYKDILRGLQLPDIDPMDFRAGLDALDISDVPAYMNGEQDVLFTEDMLLGDFAEEDDLDLDDIGDDFCEDFPEIPSGYDFGRGDMFRQVDFCV

SEQ ID NO: 55169 - protein, 322 aa, Oryza sativa; identical to SEQ ID NO: 35677

SEQ ID NO: 55170 - protein, 498 aa, Oryza sativa
MRGGLLVLLLLTAAVAGGGGHEGSSSCPFHAHDKPHDDHHHGHGHGHGHSCGGGGDDSHHVHHHHHGHGHGHDGGIQRRLLPEELAEEADLELDSFGDHHHHHHHHHEHHHHDHHHGHGDFQAELSPLGMWLSAMGCSLLVSMASLVCLVLLPVIFFQGKPSKTMVDCLAIFGAGAMLGDSFLHQLPHAFGGGHSHTHDHQNHNHSHEHSHAHSLEDLSIGLSVLFGIVFFFIVEKIVRYVEDNSQKGAHGLGHHHHHHKRHDRSDKAKLNHAEKDHEDKGVNQAEKEPSHDGAIEKTDGVTRADSKSAIRKRGLSSGSNSADREPVNSESDPAPNKALSSEDSSVSNSNMVFGYLNLFSDGVHNFTDGMALGSAFLLHGSVGGWSRTLFLLAHELPQEVGDFGILVRSGFTVTKALFFNFLSALVALAGTALALSLGKDPGHSSLIEGFTAGGFIYIAVAGVLPEMNDQKTTVKSSMIQLVSLTMGMLVALGISLVE

SEQ ID NO: 55171 - protein, 930 aa, Oryza sativa
MLMFPLARPPGRHYADATLRRGQWRLSHHLRAAAAATSGGGAPDVFDAVPALDDRMRCSALLRERAVGGDHYGCTSLLRWMLARGLRPNRLALAAAVKSSSALPDCRGGAALGRCLHGLAVKVGYADGAVVAKAVMDMYGRIGSLADAHTVFDEMSCSDAVCRNILITASSRAGLYNDVFHLFRAMLASGVDESMPTAVTVAVVLPVCAKLRVLRAGRSIHGYVIKTGLEFDTLSGNALVSMYAKCGGSIAMDDAHLAFSTICCKDVVSWNSIIAGYSENGLFEEALALFGQMISEECLPNYSTLANVLPFCSLVEYGRHYGKEIHGFVVRHGLEMDISVSNALMAHYSKVCEMRAVESIFRSSKMGDIVTWNTVIAGYVMNRYPSRALKLFQGLLFAGMAPDSVSLISLLTACAQVGNLRVGIRVHGYIFRHPELLQETSLMNALVSFYSQCDRFDAAFRSFITIQNKDSVSWNAILSACANSEHHIEQFFRLLGEMWHDVTQWDSVTILNIIRMSTFCGIKMVQESHGYSLRVGYTGDSSVANAILDAYAKCGYLHDAETLFRSLAGRNIVTGNTVISCYLKNNCVEDAEMTFNHMAEKDLTTWNLMSRLYAQNDLCDQAFCLFHQLQSEGLNPDTISITNILSACIHLSSVQLVKQCHGYMLRASLEDIHLEGALLDAYSKCGNIANAYNLFQVSLHKDLVIFTAMIGAYAMHGMAEKAVELFSKMLTLDIKPDHVVLTALLSACSHAGLVDAGIKIFKSIREIYGVEPTEEHCACMVDLLARSGRLQDAYSFALDMPPHVVNANAWGSLLGACKVHGEVKIGQLAADRLFSMEAEDIGNYVIMSNIFAADDKWESVEHVRKLMKSKDMKKPAGCSWIEVEKTRHLFVASDVQHQDRFSIYDVLGSLYQQIRGTQGGIEHLVVTYEL

SEQ ID NO: 55172 - protein, 268 aa, Oryza sativa
MRKRERENPCEICGHYHNSEEGERCGVCGHRSGPMAGEPPATLDPAFPTEVLKDFLFLGSYNNASRSEVLKTLSITHILNTVPDCQNLYRNSFTYHCIQDERSLDFDGANRFLEQCERETSRVLVHCMSGKNRSAAIVIGYLMKSRGWRLSQSYQWVKDRRPQVQLTDASQNQLVEYEQKLFGPNVGAPAQSSVPTESFRPLGFGFPKPAGDIQAPVFNQQPVPSIFERVNPSNIPSNFTFGAMEANTPMDDNGAPAPTSGDNPMDSS

SEQ ID NO: 55173 - protein, 64 aa, Oryza sativa
MTYMHTRAMIHFIVLSGFYELLVSTRFIFPSKLISSLICPHEICSLSFILKFYLLFSLPPSTYH

SEQ ID NO: 55174 - protein, 484 aa, Oryza sativa
MTTQACKKRRAVYISSESEDSGTDSEVEGSKLSKKDGVTSVYTCGHQPTSKNKVDPMNTSKSRQCGSILKKLMDHKSGWIFNTPVDPVVYGIPDYFDVIRNPMDLGTVKRKLTSKQYSNPYEFAADVRLTFSNAMKYNPPGNDVHGIADQLNKIFDSEWKLLERKWKDRNLVQEQPSLKVLKAQPAVTPKPVLPKGVTAGTNSAVSKTLATALSSKVKIKFSVRGSELTSSKDTPLQAVGRRDGTINQSLPCTKDNAKTPRIQSSEDRSESTGNELRPCDDASTSPLASSRQEEEYLPEEPLSPSKALRAAMLKSRFAGTIVKAQQKALLDHGKKIDPAKLQLEKERLEKRQQEEKARIEAQVKAAEAAAQLKLDEEMRMKREQERRAARLALHMMKKTVDIDNSDFLKDLENLSKKWELNPPGKLIVDFVDGIDLPPGLGSPLERLGLFMKKDLEEEVEHEMEDSVSPSTEIDVEEGEISFCQ

SEQ ID NO: 55175 - protein, 1051 aa, Oryza sativa
MDIIDLCSDSEEYFSPYSDTEDNLDFDDPNDGVNQVVLHNTAFGNNSSELLVGLDDDNWLNNTHALSSHRPAENRSDIIESSSGVNTDCQNSAWQYRTLPHTFMSSSYKSRPLSLTGGNNVESTHPTVKPNTVHYNGIGFPSPAIASGYKPYVSYGQGVSIDDDDDDVYEVLHQPFPFSHSSLGDKKIEEESTWKYNGFQTSSAYGIEMPTSAMSTGGVSAYGGLNSHRIFPPSVPYNNSVNNFGVNGLGTQSHLNIEKRLFGRDERVVYDEALKQISQETTEENLPEGVMSVSLLKHQRIALAWMVSRENSSHCSGGILADDQGLGKTISTIALIQKERVEQSKFMSADVGSMKSVANLDEDDEVVIVMDKKQLKGESVNMLQDSTLFPSSEAASDAADLKPWASLPGSAVDRMVNAVKVEPKKKARVRPSPSSTLRSANRSTAGTLVVCPASVLRQWASELAAKVTESSKLSVLVYHGGSRTKDPTELTKYDVVVTTYTIVANEVPKQNFDEDMEEKNSETYGLCPAFSIGNKRKKDSEPKKKKKPKNSDADLDGGPLARVRWFRVVLDEAQTIKNHNTQVARACCGLRAKRRWCLSGTPIQNTIDDLYSYFRFLKYEPYSVYGSFRSMIKYQISRDATRGYKKLQAVLKIVLLRRTKETLIDGEPIIKLPPKTIQLSKIDFSKEERTFYMMLEEGSREKFKEYASAGTIRENFANILVLLLRLRQACDHPLLLKGKEKDLIDTGSVEVANKLPKETVINLLGQLEGDYAICSRCSDPPEDVVVATCGHVFCYQCVHKSLTSDENVCPSPSCGKKLSAQTVFSPGVLRFCIADKLESGATTSSSVEADGSPSICESSYISSKIRATTDILNSIVNTPALTWSDTMESSPSEVAPSKAIVFSQWTGLLDLLELSLDSSRIKFRRLDGAMSLNLREAAVREFNTDPEVRVMLMSLKAGNLGLNMVAACHVIMIDPWWNPYAEDQAVDRAHRIGQTRPVTVSRLTIKDTVEDRILALQEKKRKMVQSAFGEDKPGGSATRLTIDDLQYLFGI

SEQ ID NO: 55176 - protein, 736 aa, Oryza sativa
MPHTTSKPGIMVGVRCSCIDSNSESSVQTFDAVTRIAVTTHHMPCANCNSQTEANLPMGNHRLLLLLLLLLAVVGSDHGGVLAADEFTYNGFGGANLTLDGMAAVAPNGLLVLSNGTNQMAGHAFHPTPIRLRGGAAGGAVQSFSAAFVFAIVSNFTVLSDNGMAFVVAPSTRLSTFNAGQCLGILNVTDNGNADNNIFAVELDTMLNPEFQDMNSNHIGVDINSMKSVQNHSAGYYDEATGAFNNLSLISRQPMQVWVDYDGATTVLNVTMAPLDVPKPSKPLISAPVNLSSVVTDTAYVGFSAATGVIYTRHYVLGWSFSQNGAAPSLHTSSLPALPRFGPKPRSKVLEIVLPIATAAFVLALVIAAFLFVRRRVRYAEVREDWEVEFGPHRFSYKELYQATKGFKNKQLLGTGGFGRVYKGVLAKSNLEIAVKRVSHDSKQGMKEFIAEVVSIGHLRHRNLVQLLGYCRRKGELLLVYDYMSNGSLDKYLYDKTKPVLDWGQRFQIIKGVASGLLYLHEDWEQVVIHRDIKASNVLLDGEVNGRLGDFGLARLYDHGVDPQTTHVVGTMGYLAPELVRTGKATPVTDVFAFGVFVLEVTCGRRPLGCIAPDDQNVLLDWVQEHERRHAALDTVDARLCGKYDADEARLALKLGLMCAHPLPDARPTMRQVTQYLDGDAPMPEVAPTMVSYAMLALMQNDGFDSFAMSFPSTVTSTASPMSADVSAVSGLSGGR

SEQ ID NO: 55177 - protein, 424 aa, Oryza sativa; identical to SEQ ID NO: 32887

SEQ ID NO: 55178 - protein, 616 aa, Oryza sativa
MAVKASSADNRTRSTVSLCIVIGMCCFFYILGAWQKSGFGKGDSIALEITKRTDCTILPNLSFDTHLAKQARPRDLVSPAKKFKPCPDRYTDYTPCQDQNRAMKFPRENMNYRERHCPPQKEKLHCLIPPPKGYVAPFPWPKSRDYVPFANCPYKSLTVEKAIQNWVQFEGNVFRFPGGGTQFPQGADKYIDQLASVVPIANGTVRTALDTGCGVASWGAYLLKRNVLAMSFAPRDSHEAQVQFALERGVPAVIGVLGTIKLPYPSRAFDMAHCSRCLIPWGANGGIYMMEVDRVLRPGGYWVLSGPPINWKVNYKGWQRTKKDLEAEQNEIEEIADLLCWEKVKEIGEMAIWRKRLNTESCPSRQDESSVQMCDSTNADDVWYKKMKPCVTPIPDVNDPSEVAGGAIKPFPSRLNAVPPRIANGLIPGVSSQAYQKDIKMWKKHVKAYSSVNKYLLTGRYRNIMDMNAGFGGFAAAIESPKSWVMNAVPTISKMSTLGAIYERGLIGIYHDWCEAFSTYPRTYDLIHASGLFTLYKNKCNMEDILLEMDRVLRPEGAVIMRDDVDILTKVNRLALGMKWNTRLVDHEDGPMVREKVLYAVKQYWVGGNQTAAAAA

SEQ ID NO: 55179 - protein, 50 aa, Oryza sativa
MQARDYVLYLSLLDVLSRNEQIPLEAYSEVPELKTHPFSHEKFHHRSVAS

SEQ ID NO: 55180 - protein, 325 aa, Oryza sativa
MSVFGSPTVLMAGPASNHFVFSNQDLIFTQTKAINVLIGCSIMTLSGDELKQVRSALQGYLSPEMVTKYVWKMDEEVRRHIDLNWVGHKTIKVAPLAKRLTFNIISSVMFGQGAAPFREALAIDFEKVVRAALSIPVNIPFTKFNKGLSASRRIRKLLRQIAHEREAAFQQGYCSSADDFFTYMLALRSEGKHSLTVEDIVDNAILLLIAGYETSSVLITFLIRQLANEPDILGKITDEQEEIARNKGPNKPLTWNDVSRMKYTWKVAMETLRTVPALLGSFRTATKDIEYRGYHIPKGWQVFSSHLLMKDSAEINTEIAYHFLI

SEQ ID NO: 55181 - protein, 352 aa, Oryza sativa
MAAAGWPLSSSVADLLPASLSLTLLLASLVVVVVLAAAAFFFEHIRKIGCTHSLERTEVSAAFFEDPNSLNKVRCPSIYDPAEKYISLIIPAYNEEHRLPEALTETLNYLKQRSAVEKSFTYEVLIVDDGSTDHTSKVAFEFVRKHKIDNVRVLLLGRNHGKGEAVRKGMLHSRGELLLMLDADGATKVTDLEKLEAQVRALAKKAESSLAPSSSPSQRLSDAEIAVFGSRAHLEKQALATRKWYRNFLMKGFHLVVLLTAGPGIRDTQCGFKMFTRAAARKLFTNIRLKRWCFDVELVYLCKHLRIPMAEVSVNWTEIPGSKVRMTSILHMVFELLLIKVGYGLSIWKIYS

SEQ ID NO: 55182 - protein, 604 aa, Oryza sativa
MVRELRLDSFYARLRAAAAASAADASSPLLILPSAADADALCALKVLTHVLSADSIRFSIYPVASAAAAASLLASFSASHPLCLLLINWGAHRDLRAVLPPAATAFVVDSHRPIHLHNLSAANDRVVVLFTTDDEHTADLSYDFDVSSLADASDLSAQGEADDHLRVAEEDEDSDASDSDSDGEGGRRKRRRLSDDAEANGDPERLFGKLRREYYRLGTFHGKPSGCLMYELAHALRKNTNELLWLACVSLTDQFVHERITNERYQAAVMELEQHINGSGNLDPSGVGAVVTLKDGTKIRAPEASRIAYEDEPRLMLLREWSLFDSMLCSSYVATKLKTWSDNGLKKLKLLLARMGFPLADCQKRFQYMSMEVKRKMRDEFDRFLPEYGLTEFYYRSFLRVHGYRSKVSAADVVYGVTALLESLNAESKDSKGSSAAEQFWVAYSALSLSNVDQLRKGMQSAIEIQRAILRQGSSAITKTGFIRSAKKFRWVKLDDPVDTDKLCQPQALTKFCFFLMDALRERGARMKPLICACLAREPEKVLVVGVCGKPRLGAVKGNAFGNAFRSAAEEIGADYFHDMFESSWIVLDVVAVSSFMIRLTEKL

SEQ ID NO: 55183 - protein, 501 aa, Oryza sativa
MDGSNENIQFSWGKKRAKGGIKMDTQFYDSFTFDNVKYSLYDNVYLFKSGESEPYIGKIIKIWQQNQAKKVKILWFFLPDEIRKHLSGPVMEKEIFLACGEGVGLADINPLEAIGGKCTVLCISKDERNRQPSPRELAMADYIFYRFFDVNSCTLSEQLPEKIAGVEGNLLLNSKVEQVTSCSDQEVHGVDQKMLNVPVPLPQSTVMEDESPVAAVSLPPSVFKEENVASAIPFPQPVVKEESAAAAIPPPHVALKEESVSKSTENITKPAQKVLPGERPPKRVKFSENVTVQNVPLDVPERPSRTGPLELAGRQADRSKWFKIPWDTRLRNADEQGTLVYIQNLDIQFAAADIEELIRDALQLNCIAKPINHPTYDDPNNGKAYAIFKTKSAADSAISKINSGLVVGGRPLYCSKGLLKVPKPSETLLGHLTINNIRMGIRQREEQKKAVSTSHCSQPNTMEYDLALDWMLVRAKQETKFRTLHKKHKDERKTFASKMGK

SEQ ID NO: 55184 - protein, 446 aa, Oryza sativa
MMSRSASALQVLLVFATVFAATQWATSSAMYCNDLTASVHRPHNKGGAELFVPAGRWLTGSFNLISHLTVSLDADAVIIGSQDSSDWPVIDPLPSYGRGRELPGKRHQSLIFGSNLTDVIITGANGTIDGQGELWWNWFHNHTLNYTRPPLLELMYSDRVVISNLTFMNAPFWNIHPVYCSQVLVQHLTILAPISSPNTDGIDPDSSSNVCIEDCYIRNGDDIVVIKSGWDEYGISFAHPSSNISIRNITGQTRNSAGIAFGSEMSGGISDVRAEGLRFINSVHGIRIKTAPGRGGYVKNIYIADVSMDNVSIAIRITGNYGEHPDDNYDKNALPVISNITIKNVVGVNIGTAGMLLGIQGDIFSNICLSNVSLSSKSADPWNCSLIEGFSNSVAPEICEQLWPSPGPGQVCYDGNSYPVPAAQQPYKSGATRLQNPFLKFISLYS

SEQ ID NO: 55185 - protein, 252 aa, Oryza sativa; identical to SEQ ID NO: 30018

SEQ ID NO: 55186 - protein, 547 aa, Oryza sativa
MASGSSGGGYADEKGPGAATMQALGLQQQHGGGGEVEEESSEMGEKTAARTRLSGLLWHGGSAYDAWFSCASNQVAQVLLTLPYSFAQLGMASGLLFQLFYGLLGSWTAYLISILYLEYRTRKERDKVDFRNHVIQWFEVLDGLLGRHWRNVGLAFNCTFLLFGSVIQLIGCASNIYYINDHLDKRTWTYIFGACCATTVFIPSFHNYRIWSFLGLLMTTYTAWYIAVASLIHGQVEGVAHSGPTSIVLYFTGATNILYTFGGHAVTVEIMHAMWRPQKFKAIYLLATVYVLTLTLPSASAAYWAFGDALLTHSNALALLPRTPWRDAAVVIMLIHQFITFGFACTPLYFVWEKLVGLHGCPSLCKRAAARLPVVLPIWFLAIIFPFFGPINSAVGSLLVSFTVYIIPSLAYMVTFRSPQSRQNAVERPPRFAGGWTGAYVINSFVVAWVLVVGFGFGGWASITNFVHQVDTFGLFAKCYQCPPHPAAAALSPPGAIAPAPASMLPPFNSTAAGIFAAPVPSPAPAPAPMHFVLGHHHHHRHHRHGL

SEQ ID NO: 55187 - protein, 285 aa, Oryza sativa
MDDLTKPLDEESIKVTMDDFVNALHEITPAFGASTDDLERCRLRGMVDCGKAHRHLYERGMLLVEQVKVSKGSPLVTCLLEGPAGSGKSALAATVGIDSDFAYVKIISAETMIGFSESSKCAQICKVFEDAYKSQFGIIILDDIERLLEYVAIGPRFSNIISQTLLVLLKRVPPKGKNLLVIGTTSEVGFLESIGMCDVFSVTYHVPKLKKEDATKVLRHLNVFDEADIDAAAEALDDMPIKKLYTLVEMAAQGPSGGSAEAVYGGEEKIDINHFFSILSDIIRY

SEQ ID NO: 55188 - protein, 477 aa, Oryza sativa; identical to SEQ ID NO: 31599

SEQ ID NO: 55189 - protein, 445 aa, Oryza sativa
MSFRSIVRDVRDGFGSLSRRGFEVRLVGHRRGRSHSAVHELRDGHAAAAAANVVQSSCWANLPPELLRDVIERLEASEAAWPSRKNVVACAAVCRTWRDMCREIVKNPEFCGKITFPVSLKQPGPRNGAIQCFIKRDKSTQTYNLYLCLSSAVLVESGKFLLSAKRYSRATCTEYTIFMSADNTSRSSNMYIGKLRSNLLGTKFVIYDTQPPCNTANVSQSGKTSRRFYSRKVSPKNPSSTYSIAQVSYELNVLGTRGPRRMNCVMHSIPASSLEAGGTVPCQPDSVLARSLDESFGSISFSKSSIMDRSIRFSSSRYSDISVGGPMVGGQALGDSDESKERPLILRNKAPRWHEQLQCWCLNFKGRVTVASVKNFQLVAATQPAAGAPTPSQPAPPPPPDHDKVILQFGKVAKDMFTMDYRYPLSAFQAFAICLSSFDTKLACE

SEQ ID NO: 55190 - protein, 638 aa, Oryza sativa
MQRGSLGVLRLRLWLWLLAVSASTAVLAADPSKEPFTIRISCGSFDDIRTAPTNTLWYRDFGYTGGRFANATRPSFIIPPLKTLRHFPLSDGPENCYYINNVPNGHYQVRLFFALVADPNLDSEPIFDVSVEGTLFSSLLLGWSSEDEKTFAEALVFVQDSSLSICFHSTGHGDPSILSIEVLQIDDNAYKFGPSWGKGTILRTAKRLTCGSGKPAFDEDLNGIHWGGDRFWLGVKTLSSSSDDQPISTENVIAETLLAPNFYPQSIYQSAIVGTDRQPSLSFEMDVTPNRNYSVWLHFAEIENGITAEEERVFDVLINGDTAFKDIDIIRMAGERFTALVLNKTIVVTGTTLTIVLQPLKGTRATISAIEVFEIILAEKKTLTQEVSALRTVKGSLGLPLRLGWNGDPCVPQQHPWSGVECQFDDIKGHWVIDGLGLDNQGLRGFIPSDISKLQHLQSINLSGNSIKGNIPVTLGTISGLQVLDLSYNELNGSIPDSLGQLASLQILNLNGNYLSGRVPASLGGRPLHRARFNFTDNAGLCGIPGLHECGPHLSVAAKIGMAFGVLVAILFLVVFAACWWKRRQNIRRAQKLAAAREAPYAKSRTQFTRDMQMAKHHRPHESSRSGNDESTPHLLPS

SEQ ID NO: 55191 - protein, 491 aa, Oryza sativa
MCRVVEMELSLMYDILYTKVAVVHTWFGYIIRLASPVVSATAFLLFWFQGKDEQRRADVLITYILMVGTIILDVRWLLRAMVSTWTYSFLNNRPDCWFHAACLSSGRWRLLRRLVLCLDPCRLLGKEPTRYRMWSGTVGQYNLLHECTHGTIGMFGSLLKKVVSDDSWMEYQYHDARGLAISSEVRELLFQQIWEQLKTAYPAATVEKTNLLSCSSLGYAGSAWKNRELDEAMNFAHAFQETILIWHIATDIFLLVSRQFASPSNSKQVQVIMALSNYMAFLVAVRPSMLPGLKLRSLYKETHKALVEILLKEGYSGSLIERKEKLADRLIEMEKEKQVQISNAPKKVSNWRPGYSNHKSRPAKASVLYDENIILSDGAKFAEVLLSRAWVDSPHITAHIEISPERYERIKEMIPKLEEQVAFDISVMLDYIFKAWVRILMYASVRCTRDSHAKQLACGGELTTIVWILNEHAGIFRIPGDARDETGELGT

SEQ ID NO: 55192 - protein, 682 aa, Oryza sativa
MEGKHVVMSAVGIGIGVGVGLGLASAPWAGGGGQGARVGVTVERVEQELRRLVVDGADSRVTFDGFPYYLSEQTRVLLTSAAYVHLKQADISQYTRNLAPASRAILLSGPAELYQQMLAKALAHYFEAKLLLLDPTDFLIKIHSKYGGGSSTDSSFKRSISETTLEKVSGLLGSLSILPQKEKPKGTIRRQSSMTDMKLRSSESTSSFPKLKRNASTSSDMSSLASQGPPNNPASLRRASSWTFDEKILVQAVYKVLHSVSKKNPIVLYIRDVEKFLHKSKKMYVMFEKLLNKLEGPVLVLGSRIVDMDFDEELDERLTALFPYNIEIKPPENENHLVSWNSQLEEDMKMIQFQDNRNHITEVLAENDLECDDLGSICLSDTMVLGRYIEEIVVSAVSYHLMNKKDPEYRNGKLLLSAKSLSHALEIFQENKMYDKDSMKLEAKRDASKVADRGIAPFAAKSETKPATLLPPVPPTAAAAPPVESKAEPEKFEKKDNPSPAAKAPEMPPDNEFEKRIRPEVIPANEIGVTFDDIGALSDIKESLQELVMLPLRRPDLFKGGLLKPCRGILLFGPPGTGKTMLAKAIANEAQASFINVSMSTITSKWFGEDEKNVRALFTLAAKVSPTIIFVDEVDSMLGQRNRAGEHEAMRKIKNEFMTHWDGLLSRPRSKNSCPCCDQPTL

SEQ ID NO: 55193 - protein, 346 aa, Oryza sativa
MASSASSSRHQVTITLGRSGQVVKRRAVSDIDNDDGVHLGRKRSVRDRLGNNMVGSESYDGQQRNKRRQIETNGLQHGDNDCQVGRDDLRLKLMKKGLSSNGGAEQNGVDLREKLSRKPKNIRRYDARGHVPESRSRYDGRDKIPELRSRYGMRERLPEPRTSALPSRIPSARSMDDLLKLDSSREAYSSWSGNLRHRSPEKLKSARRDMSPSRTYDHIRSMPPIRSAGTSRTSGLITRDAPDALRTQPYAGKSTISIDTTQPANGVASSATVMPTAPVMPEVPLTVTGLLNSLGLEKYVFLFHAEEVDMAALSQMGDSDLKEIGVPMGPRKKILQAVAPYSKRRR

SEQ ID NO: 55194 - protein, 462 aa, Oryza sativa
MDFSGDVKPAIHRPSVAAARGGGNGGAIPLLRGWQAFRRSGAPARLLCFEGGAWADVAGEVVGLLRRAFMEGKAVCEAACGGRVFLFDFMRMVRIDEATAEEAALGWIDDRGACFFPAPEGGRKRKRERDAGSEVKGEDRRRRQPAAEEEDGDEASSGVEERSGESRPEADEPDRKKARGTLWGKAVRLDEADKFYKVVEKLFVSRMAPVAAARGVAITAVHKVAQGPRARAFHLQGQLLAAARGVGDGSNAKFAWYGAPAADVAAAVEHGFGRTNGQFLGGRAHGDGVHLSPPQYPHASAMLTKPDENGEAHIVLCRVLMGRPEAVPASSPQFHPSSDEYDSAVDNLENPRWYVVWSTDMNTRILPEYVVSFRWPNLPQMEGSSGLGSKLKKPSPAATRDMFPMLLTEIQRFVPSPKLQTLQRTYNCFKRGQMKKDQFIRFLRSHIGDNVLTTVAKKLRGY

SEQ ID NO: 55195 - protein, 399 aa, Oryza sativa
MSQERSQSQSPRSPASAAGVPFLSISVTDPVKMGTGVQAYISYRVITKTNLPDFEGQEKIVIRRYSDFEWLHDRLAEKYKGIFIPPLPEKNAVEKFRFSKEFIELRRQALDLFVNRIASHPELKQSGDLKIFLQADEEKMDRERSYETGIFKKPSDFLQMFKDVQSKVSDVVLGKEKPVEESSPEYEKLKNYIFELENHLAEAQKQAFRLVKRHRELGQSLADFGKAIKLLGACEGDSLEKVFSEVGSKSEMLSVKLQREADNLLFNFEEPLKDYVRAVQSIKATMVDRANAFRQHHDLFQQKEYKGVNLEKLKFVNPDKFSELEAEVRELTADSEEATKRFEHIVAVMNEELARFQEQKTADIGFAFHEFAKGQAKLAKDIADAWRGVLPKLEACSTS

SEQ ID NO: 55196 - protein, 138 aa, Oryza sativa
MSGTPLPPPALPPPPGTDMTGICFRDQLWLNTYPLDRNLVFDYFALSPFYDLTCNNESLRSRQIHPLDMSHLTKMTGMEYVLSDVMEPHLFVIRKQRRESPVKSNAMLAYYILDGSIYQAPQLCSVFASRISRAMHHI

SEQ ID NO: 55197 - protein, 516 aa, Oryza sativa
MVIARGLLRSNASSSSSQAINLLKYVTSTGSLQGHTQNLCDASTRHFSSVPSPQYNSTEENGFKGHGMLAPFTAGWQSTDVHPLVIERSEGSYVYDIDGKKYLDSLAGLWCTALGGSEPRLVKAATEQLHKLPFYHSFWNRTTKPSLDLAKELLSMFTAREMGKVFFTNSGSEANDSQVKLVWYYNNALGRPDKKKFIARSKSYHGSTLISASLSGLPALHQKFDLPAPFVLHTDCPHYWRFHLPGETEEEFATRLANNLEELILKEGPETIAAFIAEPVMGAGGVIPPPKTYFEKVQAIVKKYDILFIADEVITAFGRLGTMFGSDMYNIKPDLVSMAKALSSAYVPIGAIMVSPEISDVIHSQSNKLGSFAHGFTYSGHPVACAVAIEALKIYQERNIPDHVKQISPRFQEGVKAFAGSPIVGEIRGVGLILGTEFADNKSPNDPFPAEWGVGAIFGAECQKRGMLVRVAGDNIMMSPPLIMTPDEVEELVSIYGDALKATEERVAELKSKKNN

SEQ ID NO: 55198 - protein, 346 aa, Oryza sativa; identical to SEQ ID NO: 33104

SEQ ID NO: 55199 - protein, 513 aa, Oryza sativa
MQPDPSGSGGDDNANAKAKLAPPPVTAAGGRPVSVLPHKTANVRDHYRIGKKLGQGQFGTTYLCVDKASGGEFACKSIPKRKLLCREDYEDVWREIQIMHHLSEHPNVVRIRGAYEDALFVHIVMELCAGGELFDRIVAKGHYTERAAAQLIRTIVAVVEGCHSLGVMHRDLKPENFLFASAAEDAPLKATDFGLSMFYKPGDKFSDVVGSPYYVAPEVLQKCYGPESDVWSAGVILYILLCGVPPFWAETEAGIFRQILRGKLDFESEPWPSISDSAKDLVRNMLCRDPTKRLTAHEVLCHPWIVDDAVAPDKPIDSAVLSRLEHFSAMNKLKKMALRVIAESLSEEEIGGLKELFKMIDTDDSGTITFDELKEGLKRVGSELTEHEIQALMEAADIDNSGTIDYGEFIAATLHMNKLEREENLVSAFSFFDKDGSGFITIDELSQACREFGLDDLHLEDMIKDVDQNNDGQIDYSEFTAMMRKGNAGGAGRRTMRNSLQLNLGEILNPSNS

SEQ ID NO: 55200 - protein, 932 aa, Oryza sativa
MREMLASLSSSSRAAISCIPLCLLFLTLASSNGVFAAAPPKVGSGYKLVSLVEHPEGGALVGYLQVKQRTSTYGPDIPLLRLYVKHETKDRIRVQITDADKPRWEVPYNLLQREPAPPVTGGRITGVPFAAGEYPGEELVFTYGRDPFWFAVHRKSSREALFNTSCGALVFKDQYIEASTSLPRDAALYGLGENTQPGGIRLRPNDPYTIYTTDISAINLNTDLYGSHPVYVDLRSRGGHGVAHAVLLLNSNGMDVFYRGTSLTYKVIGGLLDFYLFSGPTPLAVVDQYTSMIGRPAPMPYWAFGFHQCRWGYKNLSVVEGVVEGYRNAQIPLDVIWNDDDHMDAAKDFTLDPVNYPRPKLLEFLDKIHAQGMKYIVLIDPGIAVNNTYGVYQRGMQGDVFIKLDGKPYLAQVWPGPVYFPDFLNPNGVSWWIDEVRRFHDLVPVDGLWIDMNEASNFCTGKCEIPTTHLCPLPNTTTPWVCCLDCKNLTNTRWDEPPYKINASGQTARLGFNTIATSATHYNGILEYNAHSLYGFSQAIATHQALQGLQGKRPFILTRSTFVGSGAYAAHWTGDNKGTWENLRYSISTMLNFGIFGMPMVGADICGFYPQPTEELCNRWIELGAFYPFSRDHANFASPRQELYVWESVAKSARNALGMRYRLLPYLYTLNYQAHLTGAPVARPVFFSFPDFTPCYGLSTQYLLGASVMVSPVLEQGATSVSAMFPPGSWYNLFDTTKVVVSRGEGAVKLDAPLNEINVHVFQNTILPMQRGGTISKEARATPFTLVVAFPFGATEAEAEGAVYVDDDERPEMVLAEGQATYVRFYATVRGKAVTVRSEVELGSYSLQKGLLIEKLSVLGLEGTGRDLAVHVDGANATAIATSRPYFAGAEAELHGHRDVEGHKKSVMVEVGGLALPLGKSFTMTWNMQIEA

SEQ ID NO: 55201 - protein, 251 aa, Oryza sativa
MAVFVGASKESPFAGRPLPRFPVQRVPLHSTTSFAVLGRESGMSHVPEWLPAFPEPHTYVRSELWSEEVAKAGADEVERARQRRKAEKSLLSLQRRLALAGADGFRPGMLVDDAVKANGLDVVESKANPFHERALPYGEKAVSEVTMPGVGKTFSVVEAFAPAFEESKGGEFDEGMDQGQNDSQTQKRVVPKERPPVYFRIGIDKKSMVMALNSRALVELKDPWFFKEDKEQRAELILREAMDNPHELTQL

SEQ ID NO: 55202 - protein, 166 aa, Oryza sativa
MAAAAVGVASRARRSSGSRGVAFCRWTNGLLHPRFVFPEAAAVAGSGAGSAQGAFCVKRVLRMVLNKVLELFCVKKKDSKKKVAAPHPTANVSTNNSLLDPFSTGNGTVLSVQKHEPECSSVISSMTRTEYGFESDGCNLFSHFDVVQDFSDHYYAKNSPGPPKIG

SEQ ID NO: 55203 - protein, 519 aa, Oryza sativa
MPAISGTFFPPVGAGGGGAVRKRSSVEGVGDKASAVPRICIWESEGEAGDITCDIVDALEASMLYREATTVGGGVPYVRTQRSTRRVASGGTCWAPSAAATPEGKRPGQTISKGHKNYELMLQLQLGIRHSVGKSAAVPMRELSPADFDPKEKFWTRFPPEGSKVTPPHSSSDFRWKDYCPMVFRHLRKLFSVDPADYMIAICGNDALRELSSPGKSGSFFYLTQDDRFMIKTVKKSEVKLLIRMLPSYYQHVSQYRDSLITRFYGVHCVKPLNGQKVRFIVMGNLFCSEYRIHRRFDLKGSSYGRTADKFDDEIDETTTLKDLDLNFVFRLQRTWFRDLHEQLRRDCEFLESEGIMDYSFLVGVHFCDDLSASKTGLSTFTASPKFSMKRESFQGGGGMPELCFSDSDFDRIPDCRKPLIRLGAHMPARAEQASRRSEFDPFLLNGGGFLAPNQTGEVYDVILYFGIIDILQDYDITKRLEHAYKSLQTDPNSISAVDPKLYSKRFQDFIGRIFVEDG

SEQ ID NO: 55204 - protein, 157 aa, Oryza sativa; identical to SEQ ID NO: 31411

SEQ ID NO: 55205 - protein, 290 aa, Oryza sativa
MEAAVASTGSGLRCSPNPMPKQQHERRSARVGFVSQPRPRAVRCERSPHPDARAYAAVAVGVVAKGREVGGVGVERRRLAVFVSGGGSNFRAIHDAALGGEVNGDVVALVTDKPGCGGAEHARGNGIPVVVFPKSKSAPEGVSIDELLNALRELRVDFILLAGYLKLIPVELVQEYPKSILNIHPSLLPAFGGKGYYGLKVHKAVIASGARYSGPTVHFVDEHYDTGRTLAQRVVPVLANDTPEQLAARVLHEEHQVYVEAVAALCDDRIVWREDGVPLIRSHTNPDEYT

SEQ ID NO: 55206 - protein, 547 aa, Oryza sativa; identical to SEQ ID NO: 50457

SEQ ID NO: 55207 - protein, 233 aa, Oryza sativa; identical to SEQ ID NO: 32584

SEQ ID NO: 55208 - protein, 535 aa, Oryza sativa
MAEPDWILERERRQVEQILELDMEELQVEEVDDAGSSSSSEVDTFLRNTHGDGGSRTSEALAFNTSVVSLPTCDGEVHDAPGRFAFLDGGVVLCLPMFYLQGVVLFPEAILPIRVVQPRSLTAVDKAVNHVDAPCMIGVVHVYQHTNDGHHAIASVGTTAEIHHIKQLDDGSSNVVTRGQNRFRLRRRWIDADDVQWGEVQIIEEDTPQRTPRDAFGQLATNYIFNQCGTSLLSLGTSCFRQDDHVNSDQDWDSLSSTSTSSEHSVTDARTYCSSNEDEDLMLEQSWQKYDSVKRNAELENPVKHSNTRGKGEPCFQSPKSLPTKNKGAEQRRRFCAAYSSKLALQAPLSFWPRWAYEMYDSYSLARRVADLWRQIVVNPSMDDYVRKPDILSYHIGSKLPMSCSVRQELLEIDGISYRLQKEIQLLKAFNIIRCRNCLALISRRSDGPVGAYVKQFSCGQEMMTVYNATGLALRGAPSKAHSLFPGYTWTIALCAACESNIGWLFRAEKTNLLPKSFWGLRSSQVSDDTQSGHN

SEQ ID NO: 55209 - protein, 177 aa, Oryza sativa; identical to SEQ ID NO: 35689

SEQ ID NO: 55210 - protein, 186 aa, Oryza sativa
MAAHGGGGVEEDQAGSSSLCPPAAEAEAAAAAAAIARAARPPRPGRDKRLGVRHPLKHRRFRAGGKAAVAAGAREVGEATTVAEATATGPPKGSDEDDEARYICGGWTSDDGRMSCGYSSFRGRRANMEDFYDIKSSKVDDNQINLFGIFDGHGGSHAAEHLKKHFENLLKHPSFITDTKSAISMM

SEQ ID NO: 55211 - protein, 370 aa, Oryza sativa
MGEPSVARSKDCDMEYDDSSSRQSGEPLWEHAEGVERSVDYSDGLPPTSKGMFQSNKRKSKAADEDLHMKLRTRLDAEVARMFYSSGLSLKAATDPFFKSAFSRATSMPGFTAEEDEHQDDQPSLVTQMFFSIGLSPTITRNPYYRGSFAMVALFQIPGYVPPGVDQLKTTLLQKERADIENMLQTIKNTWRKAGVTIVSDGWSDFKRRPIINIIAVNEAGPVFLQAINNEDGWMWMMDDYIAEKLIAAIEDVGSENVVQVITDNDPFCRAAGVLIEQKYSHIQWTPSVAHSLSLALENICAAKNAENVVFKDCHWISEVIGDAKMINDFISNHSMVLSMISEFSKLKILGIAHTRFASDIVMLKRFRFD

SEQ ID NO: 55212 - protein, 991 aa, Oryza sativa
MSCCLCASEDAIDEARCSSCGNQDMASNHHSQSIFSAVLCSFGNCLQLNIAYAFKPEEVLVKLTEFNRRLEARSDDIKLMISMAGSKQQTCKHEVLDWLQTVELARTEVDAILQDYSKRSKHLISNFNISRRASDKLEELVDLYDRGSFEVVSVDGPLPSIEEKPIREKLVGMHLNVMKVLSYLLDAKIRLIGIWGMGGVGKTIFLKVINNQFLGVVDNMPFDHIMCVAAARGCVLENLQMNIAEKLGLLSKQGDSIESRAATIFNHLKNKNFLLLLDDLWEHVDLLEVGIPPPNESKIQKVVFATRSEEICCVMEADKRIKLECLQPDEAWELFKYSATEETICADMPIENVAKRVCAKCRGLPLALITVGRSMRAKRTWREWENALSTFDESTQLLEASEMKVINPILSTLRISYDNLENDQLKECFLVCLLWPEGYSIWTVDLVNCWIGLGLVPVGRTINDSHNIGLSRIEKLKRLCLLEEGDIKQSEVRLHDIIRDMALWIASDYKGKKDSWLLKAGHRLRNVLSCEVDFKRWKGATRISLMCNFLDSLPSEPISSDLSVLVLQQNFHLKDIPPSLCASMAALRYLDLSWTQIEQLPREVCSLVNLQCLNLADSHIACLPENFGDLKNLRFLNLSYTNHLRNIPSGVISSLSMLKILYLYQSKYSGFELELSKNITGRNDEFSLGELRCFHTGLSLGITVRSVGALRTLSLLPDAYVHLLGVEQLEGESTVSLKLQSTVTVVNFRMCLGVEELSIELDNGQDPEKSIPQLEYLTFWRLPKLSSVKIGVELLYIRMLCIVENNGLGDITWVLKLPQLEHLDLSFCSKLNSVLANAENGERRDASRVHCLSRLRILQLNHLPSLESICTFKLVCPCLEYIDVFGCPLLKELPFQFQPDNGGFARLKQIRGEEQWWNSLRWDGDATRNMLLPFYKVFDKSLETFEPALGTNPFVQASGSFFAHRKPMMRTAIQFSSYLSLLFGAQVASTN

SEQ ID NO: 55213 - protein, 222 aa, Oryza sativa
MGASPSREEAHSNSSFSGNGKAMAVASSASSSGSNQAQSKRAPALHMFQEIVAEKDFTASSLEDQIYTGIFLAGKTKKYWVDERTRNNCFMLFPRGLSITWSEDPRFWTWKPLKEGSSDADTDTQIEVPSLQNVCWLEIHGKLERSYLTPGVTYEVLFEVMLIDPAYGWSVPVNLQLKFPDGTVQQRKENLEEKIRMKWLELKVGGVKTQQGQKGEIEISMF

SEQ ID NO: 55214 - protein, 280 aa, Oryza sativa
MDDDFGDFDLDDGDGVGDDEDLDNEQDYDVDYDRLLAPVKAPPRPLSGEGDEEEEGDIAMVAAQSFVSTQDSASDTVVDYSVNEDEFHKIRLLHCDFFIRKVPDPDDDVFDFREMYVTPPDTDIYSIPRVLAPMPQKYLRCTKKNFGRYHVSEPPVEHLRDPLYKTEREIMKVFLTKHYRNRRCNDPDFFLDFEEIYVIDSKARSITRAKVVVSVPEGKKRDRRNDLLLIRDGGESFRIIDKTKRDDATTVIQREEWAKSRQDVEKHFRKLRDFDYSNWF

SEQ ID NO: 55215 - protein, 341 aa, Oryza sativa
MDIETDGRFGNKRVHHRLGPANGAASSSTSGKVCIHWRAGRCNRFPCPYLHSELPEATAKRPSQSGGGGNVWRNPHSGGGGGRGAGGAGGPNKWGRGPGGADGGPRHKVPDRPCRYFLAGDCSYGEKCRYPHSYSMSDSITMLTPLQGHEKVVTGIALPAGSDKLYSGSKDGTVRMWDCQTGQCAGVINMGREIGCMISEGPWLFVGIPDAVKVWNMQTQAEMNLTGPTGQVYALAVGNELLFAATQDGRILAWRFSAATNGFEPAASLVGHQLAVVSLVVGAMRLYSASMDKTIRVWDLATLQCIQTLSDHTGVVMSVLCWDQFLLSCSLDQTIKVSLCP

SEQ ID NO: 55216 - protein, 260 aa, Oryza sativa; identical to SEQ ID NO: 30536

SEQ ID NO: 55217 - protein, 134 aa, Oryza sativa
MASSFAAVFFSSAFAACFAEVCTIPLDTAKVRLQLQKKAALATGGGGGTTGGMLGTIMCIAREEGVAALWNGIIPGLHRQCVYGGLRIALYEPVKAFFIRDGDTVAGGVSLFAKILAALMTANQFTSKFHVLRT

SEQ ID NO: 55218 - protein, 328 aa, Oryza sativa
MVLPVLAPLAGATAVAFLLFKFATVDGDFTLVSRGAPRREKVDGKVVWITGASRGIGEVLAMQFASLGAKLILSARNKEELERVKHNIINKHPNSRVEVLPMDLSSGEESLKEHVHEAESLFSNAGVDYMIHNAAFERPKRRALEETEQGLKATFDVNVFGTITLTRLLAPSMMDRGMGHFVVMSSAAGKVPSPGQALYSASKHALNGYFSSLRSELCTKGIKVTVVCPGPIEAPQSSGATSSSQKPSSEKRVPVERCAELTIVAATHGLKEAWISYQPVLGVMYLVQYMPTVGLWLMDKVGAKRLDVAAKKGNAYGWNLLFGGKKSA

SEQ ID NO: 55219 - protein, 348 aa, Oryza sativa; identical to SEQ ID NO: 34707

SEQ ID NO: 55220 - protein, 558 aa, Oryza sativa
MALTHHLLRVLLATALPLLFLSHADAGELGVCYGRDADNLMDPQSVVSLLRANGITMVRIFDADPAVLRALANTGIKVMVALPNTDLGSAGWDPSYAQRWVESSVVPYYPATLINGVAVGNEVFDQAPHLTQQLVPAMRNVHAALARLGLADAIRVSTPITFSSVEVSFPPSAGAFRDDIAQSVMSPMIDFLQQTDSYFMVNHYPFFAYADPSTGISLEYATFRPNAGVFDPVSGVTYYSLFDAELDAVYYAINKVSGSNERASLAQAGGRVPIRVSESGHPSGGRIRSGVTEANADGDSVATKANAQVYNNGLAKRVLFGASNMEDVSAYIFALFNENKKGGPSIESNFGLFYPDGTKVYDVDFHGGGTCPTKESWCVANAAIGNARLQGALDWACSNGADCSAIQQGKVCYEPNTMVAHASYAFNDYYQRNGKASSACNFAGAAYIVYKPSPSICDPNPSWCVANAEVGDMRLQAALDYACSSCADCSAIQPGGRCFDRNTKVAHATYAFNDYYQTAGRASGSCDFGGAASIVNQAPRIGNCVLPPSKTSSMNIFY

SEQ ID NO: 55221 - protein, 622 aa, Oryza sativa
MPPSPPPLLLLLAVLLAAAPAAAQSATPREDDVRCLKEVKAELRDPDGRLSAWSFGNTSAGALCLLSGVSCWNPQESRIIGLSLSGFGLQGGIPSALQFCSAATTLDLSNNALVGVIPPALCDWIPFVVNLDLSGNQLSGQLPSELANCRFLNSLKLSGNSFSGQIPDSLGRLDRLKSLDLSDNRLDGQIPPQLATFGKDSFAGNKGLCGRPVSSRCGRALSGAGLGIVIAAGVFGAAASLLLAFFFWRCTGKSKGGRRRRRGGSESGGGSAEDGSWWAERLRAAHNRLAPVSLFQRPIVKVKLADLMAATQDFSTSHIVVAGSSRAGTAYRAVLRDGSALTVKRLHSCPLSEKAFRAEMGRVGQLRHPNIVPLLGFCVVEDERLLVYKHMESGALSSVMKEPGEAPLDWATRLRIAVGAARGLAWLHHGFQVPQIHQNLSSSAVLLDEDYEARFIDVGLTRLVRMAPGEGGDTSPFLNGDFGEYGYVAPECASNPVATMKGDVYAFGVILLELVSGQEAATVTGDAAGEGFKGTLVDWVNQLKASGRIGDAVHKSLRGNGHDSEIDEFVKIAFACIMVHPRERFSMYRVYHSLKSIGQGRDVSEQFDEFPLAYNKDESDTM

SEQ ID NO: 55222 - protein, 199 aa, Oryza sativa
MENEFQDGKTEVIEAWYMDDSEEDQRLPHHREPKEFIHVDKLTELGVISWRLNPDNWENCENLKRIREARGYSYVDICDVCPEKLPNYETKIKSFFEEHLHTDEEIRYCLEGSGYFDVRDQNDQWIRIALKKGGMIVLPAGMYHRFTLDTDNYIKAMRLFVGDPVWTPYNRPHDHLPARKEFLAKLLKSEGENQAVEGF

SEQ ID NO: 55223 - protein, 287 aa, Oryza sativa
MLIPWGGVGCCLSAAALYLLGRSSGRDAEVLRSVARAGSTKDLAAILDTASKVLPLVVAVSGRVGSDTPLICQQSGMRGVIVEETAEQHFLKHNDAGSWIQDSAVMLSVSKEVPWYLDDGTGRVFVVGARGAAGLVLTVASEVFEESGRTLVRGTLDYLQGLKMLGVKRTERVLPTGTSLTVVGEAIKDDVGTIRIQRPHKGPFYVSPKSIDQLIMNLGKWAKLYQLASMGFAAFGVFLLAKRALQHFLERKRRHELQKRCVLTNHLFGFRRTCYSHLHSSVVCSLC

SEQ ID NO: 55224 - protein, 359 aa, Oryza sativa
MQKKIEDARAQDLESIATVSTELDDAKEMLQKVAEEESSLRSLVESLKQELEAVKEEYDQLKQKDTETESIVGDLHVKLQKCKSELEAAVAAESKATSASDDLMLALQQLSSESKNALQEAEVMQKSAADLRDEAEAARVALAEAEQKLQSALKEAEEAKSAEAKALDQIKQLSERASAARASTSESGAKITISKEEFESLSRKVEESEKLSEMKVAAAMAQVEAVRASENEAIKKLEAARKEMEDMELATEEALKRAEMAEAAKRAVEGELRRWREKEQKKAAEAQPAPEAQAHGTASSPVQKASAGKANEKNDGPHKNSRTLLKKSFMLPNITSMFHKKKNHADGSSPSHLPGDKSV

SEQ ID NO: 55225 - protein, 302 aa, Oryza sativa
MSAATGEYPVPVSPPYPAASKDVELRRAMTASARSAAYSSAPVVFEDEWLAVVDKPAGVYCDALLSALPCSAATLGDEATKPNLHLANRLDRDTSGLMVITKCNKVAGKLVKAFTEHKVKKTYLALCIGYPPAWEKIKICSGHGRSKHGAWRVYAMSDVGRSLPGGSVVRDMSTRFEVLGINGKGQFREPSNFEVDETESITVQEKAADLTSDGDEKNSIILVRAYPQSGRTHQIRLHCQYLGFPIRGDVKYSGVIEWNGVDYDGHALHAESLSFVHPVTGLPVTFRSPLPSWANEFISTMA

SEQ ID NO: 55226 - protein, 497 aa, Oryza sativa; identical to SEQ ID NO: 35683

SEQ ID NO: 55227 - protein, 962 aa, Oryza sativa
MEAQATAAVKEALAALYHHPDDATRTAADRWLQQFQHTLDAWQVADSLLHDESSNMETQIFCSQTLRSKVQRDFEELPSEAFRPLQDSLYALLKKFSKGPQKVRTQICIAMAALAVHVPVEDWGGGGIVNWLSDEMNSQQDFIPSFLELLTVLPQECSSHKIAARPERRRQFENDLRSSAEVALSLLTACLGIDQLKEQVLEGFASWLRFCHGISASNLASLPLVYTALSSLNSDQFLEAAVNVTSELIHFTVSRESNGITEQLPLIQVLIPYVMGLKEQLKDSSKDEEDVKAIARLLADMGDSYVELIAAGSDDAMQIVNALLEVTSHSEFDISSMTFNFWHHLMRNLTDRGSYASYGSEVSINTERNRRLQLFRQPFEILVSLVSFRVEYPELYHTFSEEDQRDFRHSRYAVSDVLLDATDVLGGDPTLKILFTKLIQACGNGQNQKWQPVEAALFCIQAIAKSVSVEENEILPQVMSLLPSFPHQEQLLQTVCSLVGAFSKWIEAAPSELLILPPLVDILNKGMSTSEETAAAASVAFKYICEDCRRKFSGSLDGLFQIYQIALSGVGGYKVSSEDSLHLVEALSVVITTLPPDHAQRALELICQPVINPLQEIIQQGDTVLQQVPVRQLTLHIDRLSCIFSNVKLPQVVADAVNRYWPTLKSIFDQRAWDTRTMESLCRSCKFAVRTCGRFMGFTIGAMLEEIQTLYQQHNQACFLYLSSEVIKIFGSDPACANYLASLIQALFGHTIQLLRTIQDFTARPDIADDCFLLASRCIRYCPDLFVPTEMFPRLVDCAMVGITIQHREACKSILSFLSDVFDLAKSPEGEKYRELINTVILQRGAVLTRIMVASLTGALPSSRLEEVSYVLVSLSRSFGGNMLSWARECITLIPPQALTDSERSRFLNIISDASSGSSLGSITDRFAEISEVCRRNKTVQDIVQGALRPHDLSFTVAPPPL

SEQ ID NO: 55228 - protein, 462 aa, Oryza sativa
MRWGLAIQELNIKPKNWRELLTDEPFTRNDLITIQNPNAVDSKILGEFDHVKKGLKLEDEELQRMKNDPTYNINISGDLKQMIKELGTEKGKLAFLHGGGGQKAQKERAAALAAILAKKEKDDSKSGKEPKPHQPFSIVDAASASVHGRSAAAAKAATAEKTAARIAMHMAGDRAPVNAKLVKSSYTTGAASRSFTSTAYDPVTKNELEYVKVEKNPKKKGYVQLHTTHGDLNLELHCDITPRTCENFLTHCENGYYNGLIFHRSIKNFMIQGGDPTGTGSGGESIWGKPFKDELNSKLIHSGRGVVSMANSGPHTNGSQFFILYKSAPHLNFKHTVFGMVVGGLTTLSAMEKVPVDDDDRPLEEIKILKVSVFVNPYTEPDEEEEEKAKEEEKKKDEDYDKVGSWYSNPGTGVAGSTSSGGGVGKYLKARTAGFADVVADDSNKKRKASVSNVEFKDFSGW

SEQ ID NO: 55229 - protein, 605 aa, Oryza sativa
MLSVVRVHLPSEIPIVGCEITPYVLLRLPTGVVSTDDVPEAAPADGYFMRYRWYRIQSDRKVAICSVHPMEQATIQCLGCVKSKIPVAKSYHCSAKCFSDAWQHHRVLHERASSALNENGAEEEELFGRFGSTGSGVLSTTGSGSMSNLGQSPGLNNGPVPLYPSGTDKNSGETWYEVGRTRTYTPTADDIGHVLRFECVSVDAEKKVPVGPPTSIMTSRVIPAPTPTPRRLIQVSGDVLSHLDLDSQTSFGTFSVLSYNILADAYATSDAYSYCPTWALSWTYRRQNLMREIIGYHADIICLQEVQLNHFEDFFSPELDKHGYQALYKKRTTEVYTGAPHAIDGCATFFRRDKFSHVKKYEVEFNKAAQSLTDAIIPSTQRRVALSRLIKDNVALIAVLEAKFGNHGTDNPGKRQLLCVANTHVNVHQDLKDVKLWEVQTLLKGLEKIAVSADIPMLVCGDFNSVPGSSPHGLLAMGKVDQLHPDLAIDPLGILRPASKLTHQLPLVSAYSSFARMVGVGYDLEHQRRRMDPATNEPLFTNCTRDFTGTVDYIFYTADSLSVESLLELLDEESLRKDTALPSPEWSSDHIALLAEFRCKPRIRR

SEQ ID NO: 55230 - protein, 198 aa, Oryza sativa
MKSHVGTKSIVQIAHELRNLVTGEWPSAIDVWKATYLKNGTWSVPNGEEILNNLQTVAETNQERIAAAQIPMVEHFALVLGRKPNHSHGVGISAINEGAQERYRVNAQAEAAQQQANEAHQQAAALLEEVQKLTVENLQLKGELQSQREELNSQKRTVEEQSGHMECLLAQKLEERMKAMWARMGGTGGASSSSVPNN

SEQ ID NO: 55231 - protein, 570 aa, Oryza sativa
MSTSCSGALRAATTKALLLLVVAVFVVSLSRPFPCAAAARDSLLRGASIAVEDHATDVLLSPDGTFACGFYVVSPTVFTFSVWFARAADRAVVWSANRGRPVHSKRSRLKLNGRRRALVLTDYDGEVVWNSTVSANATATATAARARLHDSGNLAVEDASGNVLWQSFDHPTDTLLPTQRIAAGEAMVSADKLLAAGFYSFRFSDYAMLSLVYDNHEMSSIYWPNPYYSYWQNSRKIYNFTREAFFDASGHFSSSDNATFDASDLAKNVAVRRRLTLDTDGNLRLYSLDEVTGTWSVSWMAFSNPCIIHGVCGANAVCLYSPAPVCVCAPGYGRAEPSDWSRGCRPTFNSSDDGGQPRAMKMVPLPHTDFWGFDINSSENLSLDECSTRCMSEPSCVVFQYKQGKGECYPKSLMFNGRTFPGLPGTAYLKVPADLDMLEIHIHQWQADSDGHGIAAIQEDIVGCGGMSSPEFLLNVSNASSSKSNQGKSIWFYFYGFLTAFFVIEVFVIAFGCWLFSNKGVFKPCQVSALGEGYRMVTNHFRTYSYAELQKGTRKFQSEIGRGGSRCYKM

SEQ ID NO: 55232 - protein, 322 aa, Oryza sativa; identical to SEQ ID NO: 40583

SEQ ID NO: 55233 - protein, 438 aa, Oryza sativa
MPVAASAIYFLNLRGDVLINRLYRDDVGGNMVDAFRMHIMQTKELGTCPVRQIGGCSFLYMRISNVYIVIVVSSNANVACAFKFVVEAVALFKSYFGGAFDEDAIRNNFVLIYELLDEIMDFGYPQNLSPEILKLYITQEGVRSPFSSKPSDKPVPNATLQVTGAVGWRREGLMYKKNEVFLDIVESVNLLMSSKGSVLRCDVTGKILMKCFLSGMPDLKLGLNDKIGLEKEAQLKSRPAKSGKTIELDDVTFHQCVNLTRFNSEKTVSFVPPDGEFELMKYRITEGVNLPFRVLPTIKELGRTRMEINVKVKSVFGAKMFALGVVVKVPVPKQTAKTSFQTTSGKAKYNASIDSLVWKIRKFPGQTEATMSAEVELISTMGEKKSWNRPPIQMEFQVPMFTASGLRVRFLKVWEKSGYNTVEWVRYITRAGSYEIRC

SEQ ID NO: 55234 - protein, 595 aa, Oryza sativa
MITAADFYHVMTAMVPLYVAMILAYGSVKWWRIFTPDQCSGINRFVALFAVPLLSFHFISTNNPYTMNLRFIAADTLQKLMVLAMLTAWSHLSRRGSLEWTITLFSLSTLPNTLVMGIPLLKGMYGEFSGSLMVQIVVLQCIIWYTLMLFMFEYRGARMLITEQFPDTAANIASIVVDPDVVSLDGRRDAIETETEVKEDGRIHVTVRRSNASRSDIYSRRSMGFSSTTPRPSNLTNAEIYSLQSSRNPTPRGSSFNHTDFYSMVGRSSNFGAADAFGVRTGATPRPSNYEDDASKPKYPLPASNAAPMAGHYPAPNPAVSSAPKGAKKAATNGQAKGEDLHMFVWSSSASPVSDVFGGGAPDYNDAAAVKSPRKMDGAKDREDYVERDDFSFGNRGVMDRDAEAGDEKAAAAAGADPSKAMAAPTAMPPTSVMTRLILIMVWRKLIRNPNTYSSLIGLIWSLVCFRWNFEMPAIVLKSISILSDAGLGMAMFSLGLFMALQPHIIACGNKVATYAMAVRFLAGPAVMAAASFAVGLRGTLLHVAIVQAALPQGIVPFVFAKEYSVHPSILSTAVIFGMLIALPITLVYYILLGL

SEQ ID NO: 55235 - protein, 555 aa, Oryza sativa
MAPPPAGVEAVCAAVIKSTLTQPHNHHHLLAASPSLLAAVLHRLSPLPSTALAFFRSLPPPHPLDASLALLRLLAPHPRHHPTARSLLRDLSLRHPLSSPLLLPSLLADPHLPSWLLLLLSQSARPHDALRVFDHMRAREVVPDAHASSALLTALAKSRMTATARKVLDQVTRARVAMNTHVYNAMLHVCLKAGDAALAESLMTRMDAAGVPLDRFSFNTVIALYCRKGMQYEAMCVRERMENQGVKADVVTWNSLIHGLCKERRVREASQLLREMAMAGVAPDHVTYTTLVDGYCRAGDLEEAVKLRGEMEAMGMLPGVATYNAILRKLCEDGKMKEVNVLLNEMDERKVQADHVTCNTLINAYCKRGDMTSALKVKRRMMESGLQLDQFTYKALVHGFCKAKELDEAKEALFEMMGAGFSPNYSVLSWIVDGLCNKNNAVAVLAIPDELMKRGFPPDKAVYRSLIRRLCKKGFIDLAGNVFNEMQGKGLEADCLVYATLACAYLTAGKPVAALDILNEMAKKQLYITPQIYNCMCTSYADEKGSLNMLWASCH

SEQ ID NO: 55236 - protein, 1099 aa, Oryza sativa
MAEEDGDRFIEMVSAGTLYLSGEWERKYWSCSRGKDRYPYPVGYHAVRHFSGISYTMQIHQGPRGPLFQVTSTQGDSSTGPTPDIAWKNFHKKTAPKVRDWQRKRSFPQKIDGVELFGFKNASVQRLLRELIVRSTGAVQLNLPHPVTSDANSPLSRKVEAEISDGNEVCMDKTGGPAKRSMRPSQEEGTAKRVHYQNISTSTDKCHNELDIIADEGSNEDATGSRCTSSSLEDMPCNSTHTLVDDNLGEFVADSPEQVALSSSSYLSSQKSDLESAEREVAKSMMSILLPQAIPFLNKTHRKKKKVKHKKREETISTTTALAENPSADGCRGVVVSTSTCEGINIKTSQTYSHGQSLCEMVKDCCGNDDGMIDEPGLKSDDMKVVADSFEDDEQGWCDNKSKSMGARCHDDDACSKESLPYGNREDHDGHSECQMGIDDGTNTPDVVYDHEKGQYVLSEALLACLEEEFGAKDNSCPANYNQIDVGRRQGEQHFEDPRSGINDDSSISVGMSDKSNLRSGLIDGYAQASAKSWTGNSRHGESLTNLLQSPVHSNAHNNSEKMGGKFDDTEFVDKFVAFDKYGMKRVNTVTVWPVDVRTKTGKRNHPLEEQKECQTGCRNGNENAMVSIGCGSYVCGRVPPKDEDNACHEHAPPDVNHLNGPLCRHKETSPRVSNLHLDLMGCYLHPMPVLSIVLNTKNNSSLLIYVLCGLLESCERFLYVYTIVPKDQQETAPYFVGYTPLLLSSLERSCTGNLPFERSGLQFTPDGQFLVLLGSIRMPYCRKQIIDCSCSLCKLDQCGDNYLKIVSVDLGYVSLLTKLMAYGSLSCILICEPNYIVTVEDGRNLHIWMMAAGWRIISEEYVIPSSGNVGNSIIELRRMPKSSTLIVGHDGTGSFSLWDISKRTLLATFTAPGIIVFQIRPVVSCSLQEDIILASVSDIERRLREITVTGVSRKADKESILSPGKDTAIWILISSASVAEYQSDLRAKEHNARWRLALLANKTLIMGTILDPRATAVDVCGNHGFAGTHGGLLYAWELSSGRKLAGTQCFNSGRVSCVAVDAKSGVVAVADDGCQLVLYSQNKVLSNARAEGNMFRIK

SEQ ID NO: 55237 - protein, 431 aa, Oryza sativa
MTVTWTSGYDIKEAYPFVEWGMKWSPPTRTAAGTVTFDRESLCGEPARTVGWRDPGFIHTAFLTDLWPNKEYYYKIGHMLPDGKIVWGKFYSFKAPPFPGQKSLQRVVIFGDMGKAERDGSNEYSNYQPGSLNTTDTLIKDLDNIDIVFHIGDITYANGYISQWDQFTQQVEPITARVPYMIASGNHERDWPNSGSFFNGTDSGGECGVLAETMYYTPTENRANYWYKTDYGMFRFCVADSEHDWREGTEQYAFIESCLATVDRKKQPWLVFIAHRVLGYSSGFFYGAGGAFAEPTARQSLQRLWQRHRVDLAFYGHVHNYERTCPVYDGRCASPERSRYSGAVGGTIHAVVGGGGSHLSNFTAEAPPWSVYREMDYGFVKLTAFNYTSLLYEYRRSSDGEVHDSFTVHREYRDVLACVADSCPPTIPPAT

SEQ ID NO: 55238 - protein, 313 aa, Oryza sativa; identical to SEQ ID NO: 30967

SEQ ID NO: 55239 - protein, 155 aa, Oryza sativa
MALNEEYTYVELEKEPYWPFEKLRISITGAGGFIASHIARRLKSEGHYIIASDWKKNEHMTEDMFCHEFHLVDLRVMDNCLKVTTGVDHVFNLAADMGGMGFIQSNHSVIMYNNTMISFNMLEAARINGVKRFFYASSACIYPEFKQLDTVVSLK

SEQ ID NO: 55240 - protein, 316 aa, Oryza sativa
MMSSSSSPPPPSIPTGGGGFFRGYTKLCKGLAVILLLVHLLIQLFPSAVTYLALVPGRTIPFAWDLITGGYVELTIPGVIISIVGLLLFGKLLEPLWGSKELSKFIFVVNFSTSLCVFITAIALYYTTQEESYLYAPLSGFYGVLTGLLVGIKQLMSEQELNLFVLKIKAKWIPSLVALISVIVSFFVKELVSYLPVILFGIYMSWIYLRYFQRRLETGLKGDPSEEFSFSSFFPEFLRPVLDPIASIFHRLLCGRSERADARGQTLDTTPLPGSDSIEANRRRERGQRALEQRLAEKLAAVKSSEGTSQDASDKV

SEQ ID NO: 55241 - protein, 426 aa, Oryza sativa
MADLTDMGCCSCFCFLRKPRVSVSRPRDADGILSEDLLNHKSAEDPDGSFYTGDDPDRSFYDRDDLDRSFYNGDDPDRSFYDGDDPDHLYGSDDGQPRKRSEDIILSRAQNGFACRESLVKETKKVFRSEDENGSKMVNQYVHLGKIGSGSYGKVVLYRSMKDGKLYAVKVLNKSYMMKVRVVRSETAMTDVLREVSIMKMLDHPNIVNLIEVIDDPNADKFYMVLEYVEGKMVCDNGLGEATSRSYLRDIISGVMYLHSHNIIHGDIKPDNLLVTSTGSVKIGDFSVSQIFEDDDDLLWRSPGTPVFTAPECCQGSAYHGRAADTWAVGVTLYCMITGHYPFLGDTLQETYDKIVNDPVQIPDNMNPQLADLLERLLCKDPANRITLQAVGEHPWVAGDQGPVVEYFCRCGFGRRKRDDLKGEVQ

SEQ ID NO: 55242 - protein, 867 aa, Oryza sativa
MASGLVSSLLSSTSSLLAILRSPLSDLYPRSGHPTASANLQRLKRLLSRIQATLEDAEEQGLQDNYVKLWLKELKDLALDAEDVLDDYRYELLQSQVQELQGDYPRKRKHMDNDEEDNDSIDERINEMINRFEEISRDRDALKLRFEDGHKIVDRGNWMKSRPTSHLIDESLVFGRIDEKEDIIKSVLSHQDMEPSGIVVLPIVGMGGIGKTTIAQMVYNDSRVRKHFEHSGWIHVSPTFDVHKLTIAITESLTMKNYGFTQLSLVHGVLLEEVQGKKLFFVLDDLWNECESSWQDFLSPLRHAQTVAILVTTRSKEVARLVQTVQLYHLGCIPDKDCWLLFQHYAFGNQHESEQSILVQIGRKILQKCGGLPLAVKSLGCLLRSTMDEHAWMEILESELWELDEEDNIFPALRLSYYWLPTRLKPCFLLCSLYPRNLGFTKDDIIQLWVAQGYIYSTNGKTCREIGNEYFNELHARSLIETYRKPVCWDINKRKLCLSRFTYNERQGFSSKKRERQGFSSRNEGRQGLSSKEKAREAMFYLKNKLQCETYLKKPSTSIGRFKLHDVIFDLAKSFTRGEQCTAMFGTTCMPPVADLKLQFPNPRSVRTLVLNCCFSCYKKHSGYFMELSSFMYLRSLILNSNHDVSGMVYSIGNLRHLRYLSLNCKMRELPESVCRLHSLETLIISSLRILKSSNFQNLFSLRCLHVSFDFMDGSLDQFSDLYCLGTLCLKHCCNITYLPLHIRSLLNLQHLQLVGISNIRRLDHASFRYNKSNSTWQPDALFPSLESLELENLCNLEDLCGLQNSDCSKLQSLTVRNCSKLSRIPCFTSLRNLVISKSVVKIIQFSLAPDSSFRKYAVQALPCICR

SEQ ID NO: 55243 - protein, 364 aa, Oryza sativa
MAVALAGARSPGAGAILSLRRLAPAAAAPVRLGGSGTPGTRRRRGIAMAAAASAPPAPADALPKGADSFFRTVISNMEKVYLSRNPTAKTILELVRSYDGDHICYDHFAFRTFGVDGYGIKSLAEFFTDFGYVPREELRFPAKKLRALWFSPPTNDGYTGTGVYGPLPRIFISELLVDELSPQSQDIIQKYIRTSGKGNKHATLASTSGELTWEKPIYSDFQVLSRESEYAAWTLVNGYALNHTTISTHRLISDIRSINKFNKFVEDNGFKLNSEGGILKVSPDGLLQQSSTVADSALFTFADGITESIPRSYIEFAERLVLPQFKDLPNDEVNEHHRRDGFEVGNADKIFESTSNDQLTRRSA

SEQ ID NO: 55244 - protein, 438 aa, Oryza sativa
MAAAASYFSGTALMPSQRSGAPAPEYSAAGTGAAAAPSPSKPRDPRFSGCVPATVLHISRSFAAALAADGGGDPVFSIDGVETTNVRVLGRVVSVVSRDTDVCFTLDDSTGKIPLVRWITDQSDTRDTSYIQEGVYVKVQVNLMGFQAKKQGLARSIRPINNFNEVVLHFIECMHVHLESVQSKMQRQLPPSVQTNEYTHVPSSGGVRDYQVHFTPQVNQGLPPAVQTNTSTYVPLLGGVRDHQAHFAQVNQGQFSPAVQANTSTHLPFSGGVGEHQIHFTPKVNQGQFPPSVQTNTSAHVPYSGGFREHQVHFTPPVNQGQFPPAVQTNLYNHAASSGGVREQVHLTQANQFSAYSSTGGLQHDPQRMVLEALQQPDILLSNMEHTLMNWLEELECPKQTLWGLSSIWLQQASSIGPLMTIMSSLCVMVDQCNHPQD

SEQ ID NO: 55245 - protein, 576 aa, Oryza sativa
MPPKRRPEEESPQAAALKKRCRSFDLEIRGCRHLQELAAGCVRTLEAALESAISRIPEEVTKALTSFLIRAPRTLSDQNQPPRYKLRFSNGLSNEVFTKKGICDVNGESLKISVHVNNPQEACSHRLLSAKIRVVVLDGDFNKNDQGCWTSEEFRNHIVRPRDKVGTVLTGELELSLKNGEAYIHDATFVDNSKFMRSGKFRLGVMVIDDLGERIQEGITEPFVVKDRRGEGSKKHEIPSLDDDVWRLKKISKDGVFHDALKQSGISNVKEFLRLYYTDEPALRKILIKATDKVWTTIIEHAKKCDPGRELYSFLPENRNVVLFFNSIHQIVGVITGDHYTPFSDLDKPMQDDVGQLSKLAYADLNHFLPDFEMKNGKPRQINQCAFQESRMVEPKFTDQIQGHMDPNFAGLIQGNMDQKKRNVHESDDQQGTSGSHPRQCKLSRFGSVRVTHVASLNKNDEDSLDFSFLLNSLSDQHDASMNTNEIAASVTFHCPTASTNEITGSVVMRQASFRIDHPACENDASVAEFHQEQQVVTAQFDPSFLAVLADAPMYSTHNSFKESECHEALQKLSED

SEQ ID NO: 55246 - protein, 330 aa, Oryza sativa
MPPPPPPPPEWADLPVDAVLAVFERLGAAEVLMGAGVVCRSWLRAATREPRLWRRVDLTACFDPTVDMEAMARAAVDRAGGRLEHFAAERFVTDELLLYVAKRTSCLKSLRLRDCIKISEKGLVAVGKTSPCLEELELTTCTISILLKAVGEAFPNLKCLRLNHRWFDVQFDEFRDNFHALGIACSMHRLRHLQIFANRLRNNALAAILDNCPHLESLDLRQCFNVDVDAEVRAKCARLKDVRFPNDSTKDYEYETFIETPSLDSLPLPFPAAVPQWPFHGNDEDDDNDGDQDDDDDGDQDDDDLGGHRVTEYGFIIGDYHVRGRIIHHE

SEQ ID NO: 55247 - protein, 877 aa, Oryza sativa
METRRRRIKEWQEMKRREEETKRREQEEAGVGTSAAAAAAPAEAEDGGNAGKKWTLDGEESDEEGNQEDGKKSDDNGGSGAGAMDVDVPNGGDNANGANAMDEDEIDPLDAFMNSMVLPEVAKLESMPAANVDDKNDKSAKDAVTNGDKKGPKKVMGRIIQGEDSDSDYADDEDDEGGSEDEDDEEFMKRVKKTKAEKLAIVDHSKIDYQPFRKNFYIEVKDITKMAAEEVAAYRKQLELKVHGKDVPKPIKTWVQSGLTSKLLDTIKKLGFEKPMSIQAQALPIIMSGRDCIGIAKTGSGKTLAFVLPMLRHVKDQPAVVPGDGPIGLIMAPTRELVVQIHSDIKKFSKALGINCVAIYGGSGVAQQISELKRGAEIVVCTPGRMIDILCTSSGKITNLRRVTFLVMDEADRMFDMGFEPQITRIVQNTRPDRQTVLFSATFPRQVEILARKVLTKPVEIQVGGRSVVNKDITQLVEVRPENERFFRLLELLGEWFDKGKILVFVHSQDKCDSLLKDLFQHGYPCLSLHGGKDQTDRESTLADFKSNVCSLLIATSVAARGLDVKELELVVNYDVPNHYEDYVHRVGRTGRAGRKGFAVTFISEEEERYAPDLVKALELSEQAVPEDLKGLADRFMAKVKQGTEQAHGTGYGGSGFKFNEEEDEARKSAKKAQAREYGYEEDKSDSDSDEEGGVRKAGGDLAVQAIAAAQAAAAMVAAKAASNANQQTQGTAVGPLLPLAIASNTQNNEATARALQAAFNIQQNLARIQAHAVPEHYEAELEINDFPQNARWKITHKETLGPIQEWTGAAITTRGTFFPQGKIVGANERKLYLFIEGPTELSVKKAKAELKRVLEDCANHALNLPGSAQTGKYSVI

SEQ ID NO: 55248 - protein, 188 aa, Oryza sativa
MDGNAKDEVKVSGTMDVPAMLTYLTEKLNRAVEAVAPGSKKDEKKKDKGGDADGGEKKKDAAGGDKKDKGKSIEVAGPSTAAAAASMAPAPAEASTYHVSPYGHGYFAYPQQQGPPPSYYQYYGGGNGDGVGYANPNAGGAGGYYHPHPNDVPTYQPPPSYPPYPYQLDMSPAPQLFSDENPNACSVM

SEQ ID NO: 55249 - protein, 362 aa, Oryza sativa
MGNCMDTAAAAAAAPDTNNADPSKAASKTTYSSYPSTTKSGSSWTVPSYKDRSDLPTPRTEGEILSSSNLKAFTLSELKNATKNFKPDSLLGEGGFGYVYKGWIDEQTLAPARPGSGMVVAVKKLKPEGFQGHKEWLTEVDYLGQLHHENLVKLIGYCSDGDNRLLVYEYMPKGSLENHLFRRGADPLSWGIRLKVAIGAARGLSFLHDAENQVIYRDFKASNILLDSEFNAKLSDFGLAKAGPTGDRTHVSTQVMGTRGYAAPEYVATGRLSVKADVYSFGVVLLELLTGRRALDKSKPASEQNLVDWTRPYLGDKRRLYRIMDMKLGGQYPKKGAHAIATIALQCIRSEAKMRPQMSEVL

SEQ ID NO: 55250 - protein, 122 aa, Oryza sativa
MGLAMFGHTPLFPLHHAAAAADDDDDNDTSPLAIETSRGTCEVGSHGAMMAGSSESEYYSEEEVGWEEEGLGSKGVEEKREWALKRLDDLGKRGVCYLSRVPPNMNPSHVRLRRLLSKHGEV

SEQ ID NO: 55251 - protein, 292 aa, Oryza sativa; identical to SEQ ID NO: 32243

SEQ ID NO: 55252 - protein, 431 aa, Oryza sativa
MGANCCIAAKERPQPCVTPIEVSAFRNVRHSPSWSFRWDNRTHIEDIMEMPALFSNHSSGSIRPETKSGSIAPTDGFSNGGSPSDMFNKLKCHKSDRKRESSKIARSDLRAGRSTTSNSSPEAKLSRKSLDTVSVASDSKMSISVPSTPPAISRADPSSSSRGHSLPTDADSMRKARRSPGYQLYRQVSDSKIPSLRSLNEGASPEGRPSSSMLSVCSNDLSAVGSHGESSDGWSMRTFSEMVASSQRERWSVDSELLGSVSSKMTRSNASNNPTTHSPDQEVCKLCLKLLKERSTWNAQELAVVAVLLCGHVYHADCLDSLTAEADKYDPPCPVCTHGEKCTVKLFGKLESKTKNKIPKNVIVDVNLDGSSKHQKESRREPRLGTSSSLKGSFSRPFLRRHFSIGSRPSQSISESESARKKGFWARHWRE

SEQ ID NO: 55253 - protein, 353 aa, Oryza sativa
MAERLTRIAIVSEDKCKPKKCRQECKKSCPVVKTGKLCIEVTPASKLAFISEELCIGCGICVKKCPFDAIEIINLPKDLEKDTTHRYGPNTFKLHRLPVPRPGQVLGLVGTNGIGKSTALKVLAGKLKPNLGRFKNPPDWQEILTYFRGSELQNYFTRILEDNLKAIIKPQYVDHIPKAVQGNVGQVLDQKDERGVKAELCVDLELNQVIDRNVGDLSGGELQRFAIAVVAVQNAEIFMFDEPSSYLDVKQRLKAAQVVRSLLRPNSYVIVVEHDLSVLDYLSDFICCLYGKPGAYGVVTLPFSVREGINIFLAGFVPTENLRFRDESLTFKIAETQESLRRLRHTSDISTLL

SEQ ID NO: 55254 - protein, 681 aa, Oryza sativa
MPSKGGALNVCFEGAEDLPGGGGSKYGTSITRQWALDPSRDIMLAYMQNGEPLLPDHGFPVRAIIPGCIGGRMVKWVKRIIVTTAESDNYYHYKDNRVLPSHVDAELANADAWWYKPEYIINELNVNSVITTPGHDEILPINGITTQRGYTMKGYAYSGGGKRITRVEVTLDGGETWLVCVLDLPEKPTKYGKHWCWCFWSVEVEVLDLLGAKEIAVRAWDQSHNTQPEKLIWNLMGMMNNCWFKVKVNVCRPHKGEIGLVFEHPTQPGNQTGGWMARQKHLETAEAAAPGLKRSTSTPFMNTTDGKQFTMSEVRKHSSQDSAWIVVHGHVYDCTAFLKDHPGGADSILINAGTDCTEEFDAIHSDKAKALLDTYRIGELITTGAGYSSDNSVHGASNLSQLAPIREAIKAPAPVALSSPRDKVPCQLVDKKELSRDVRLFRFALPSSDQVLGLPVGKHIFVCASIEGKLCMRAYTPTSMVDEVGHFDLLIKVYFKNEHPKFPDGGLMTLYLDSLPVGAYIDVKGPLGHVEYTGRGEFVINGKPRNARRLAMIAGGSGITPMYQVIQSVLRDQPEDTTEMHLVYANRTEDDILLRDELDRWAAEYPDRLKVWYVIDQVKRPEEGWKYGVGFVTEEVLREHVPEGGDDTLALACGPPPMIKFAVSPNLEKMKYDMANSFIVF

SEQ ID NO: 55255 - protein, 500 aa, Oryza sativa
MATNGSSPRARETESSLEKVKRQLSSGSGRYLLQGPLLKRSETLRKWNERWVILDPTSGKMEYKIRRNETAIKGTIIFDASSTITLSPVNFQGMPKYDGCCFYIGTPQKKDYFLCAETPGAAKAWVSTLLATQLVLQAHKEAVNSLAGNGSPATLGTVATAVANANATALEATKEIEAAMKVSMRAALGLGANNPKEGQLDDLTIMKETLRVKDEELQNLAKDIRARDATIKEIANKLTETAEAAEAAASAAHTMDEQRRLLCSEIERLRQAMERQMEQSMLKLRRSEEKVISLSKEKDQLLKERDAALQEAHMWRTELGKAREQAVIQEATIARADEKVRASEADAAARIKEAAEKLHAVEKEKEELLSLVGILQSQVQREQSSTKQVCEERSESCSGTDNSPPLTKHVDASDDDVDKACVSDSRSVLVSNDNTEVQLAVDGVDIRPIGDAEWGSFQQSEALIADVREVSPESEGGSLDIPVVNPPPVSDHIQGGATHP

SEQ ID NO: 55256 - protein, 425 aa, Oryza sativa
MQVELADRAAARPSETGEAPPSSPAAAAAASAAAEDAPLLPGGGGGVRRRVVVSERFRQRSGSFRREVRRAAEETYLLTRLTLILLRYLGIGYRWIRQFLALCCYTFLLMPGFIQVVYYYFFSSQVCRSVVYGEQPRNRLDLYIPTDRTGLKPVVAFVTGGAWIIGYKGWGALLGRRLAERGILVACIDYRNFPQGTIGDMVEDASQGIAFVCNNIASYGGDPERIYLVGQSAGAHIAACTLLHQAIKESGEGDASTWSIAQLKAYFGISGGYNLLNLVDHFHKRGLYRSIFLSIMEGEESLQKFSPLVMVKDPAARSAVSLLPRIFLFHGTSDYSIPSAESEAFFDALQQNGAKADLFLYDGKTHTDLFLQDPLRGGRDKLLEEIVTVIHNDNPDTSAQHLAVPVARRLVPEFMLMLAGRVSPF

SEQ ID NO: 55257 - protein, 746 aa, Oryza sativa
MEDPQGGQDCSKFGAFVDKNSGASSSSAADIELQNMCGTSVARTASLSTGRASPSQFAPTVGRYHRAAGSCQSDVLPDEQSLASAFDMVLSFRNHPVDYPTNPCNVVPSNGLYVSGPMRATSVQSFDPLLVQDESMRPQFGAGHGKLKTDEFTVDQQEQAHMLSHYFGNWPQNYGMNNMGGVASTPYKPSASLYQQPFYMDEQSQMYAPYQQIPSNFLLQHDMDVQNHSSMQPHYVYPQMQHAAGSNVRSNQQAAACTSARGRSTYGHQLLLDGAVYHNGNNQMNSLYMDGFPGMYTDSSFDSSDFHRLLEAEKFAHPYELNSSSKGFLQPQIPDDLSTMKMLMNSAGVNRVRAIKFPPTVNGYSGVGRRTNGYGHNHLDVKSDETLHLNGLNSQFMSLKSEYDLAMKSTQLNYGSVDEVAGRIYMLAKDQNGCRFLQKVFTEGTKEDFEKILAEIIDHFGELMIDPFGNYLVQKLLEECSDDQRTRIICEITRVPGELITVACNMHGTRTVQKVIDTINTPEQISKVVSALSPGAMRLMTDTNGSHVAQRCLKKLLPEYKAFLLDVAALRFLRLAKDQHGCCIIQKCIEHSNDEQKYNLLCKITSSALSLSEDQYGNYVIQFVVNLGIEWATSKIVKELKGHFGYLSMQKCGSHVVENCLKQASELDREMIIHELMADSKLPHIMADPFGNFVIQTALKECKGELHSSFVEAIRPHAPALQNDVYAKRVLSKTYLKNKQYRLGIF

SEQ ID NO: 55258 - protein, 721 aa, Oryza sativa
MTVRETLDFSSRCQGVGRRPKILKEVSARESAAGIIPDADIDIYMKAISVEASKRSLQTDYILKIMGLEICADTMVGDAMIRGLSGGQKKRLTTAEMIVGPARAYFMDEISNGLDSSTTFQIISCFQQLTNISEYTMVISLLQPTPEVFDLFDDLILMAEGKIIYHGPRNEALNFFEECGFICPERKEVADFLQEILSCKDQQQYWSGPNESYRYISPHELSSMFKENHRGRKLEEPIVSPKSELGKEALAFNKYSLQKLEMFKACGAREALLMKRSMFVYVFKTGQLAIIALVTMSVFLRTRMTTDFTHATYYMGALFFSILMIMLNGTPEISMQIRRLPSFYKQKSYYFYSSWAYAIPASVLKVPVSILDSLVWICITYYGIGYTASVSRFFCQFLMLCFVHQSVTSLYRFIASYFQTPTASFFYLFLALTFFLMFGGFTLPKPSMPGWLNWGFWISPMTYAEIGTVINEFQAPRWQKETIQNITIGNRILINHGLYYSWHFYWISIGALFGSIILFYIAFGLALDYITSIEEYHGSRPIKRLCQEQEKDSNIRKESDGHSNISRAKMTIPVMELPITFHNLNYYIDTPPEMLKQGYPTKRLQLLNNITGALRPGVLSALMGVSGAGKTTLLDVLAGRKTGGYIEGDIRIGGYPKVQETFVRILGYCEQADIHSPQLTVEESVTYSAWLRLPSHVDKKTRSVCPLEVGTTQTYTDFNNR

SEQ ID NO: 55259 - protein, 206 aa, Oryza sativa
MGLHIWCWLVVLFSLAPLCCSLSADGLALLDLAKTLILPSSISSNWSADDATPCTWKGVDCDEMSNVVSLNLSYSGLSGSLGPQIGLMKHLKVIDLSGNGISGPMPSSIGNCTKLEVLHLLRNRLSGILPDTLSNIEALRVFDLSRNSFTGKVNFRFENCKLEEFILSFNYLRGEIPVWIGNCSSLTQLAFVNNSITGQYQVQSVY

SEQ ID NO: 55260 - protein, 301 aa, Oryza sativa
MASLWRPALAAAMCGALILSSSSSAAAAGKKTGRITVYWGQTAAEGRLREACGSGLYTTVIVSFLTGFGGGRYKLDLAGHDRGAVGPDVKYCQSRGVLVLLSIGGGIGRYSLASKADAKAVADHLWDFYLGGRSKSRPFGDAVLDGIDFDIELGRPAHYDDLARYLKAYSGRKPGGKKVWLTAAPQCPFPDRMLGEALRTGVFDRVHVQFYNNPACSYRASNAAAFAAAWRKWASSLPRSSVYLGLPAAPGAANSGYVPPAALAGEALPIVQRSRNYGGVMLWSRYWDRRTGYSKKIKHAV

SEQ ID NO: 55261 - protein, 231 aa, Oryza sativa
MSDMSKGSNTYIGKLRSNFLGTKFTVYDAHPPYDGAVVSKSRSARVVGLNQVSPRVPAGNYPVSHISYELNVLGARGPRRMNCIMDSIPTSAVQEGGKAPTQTEFPLSGLDSFPSISFFRSKSARIDSATSQLSTQKEEKLVLKNKSPRWHEQLQCWCLNFRGRVTVASVKNFQLVASDENGPTNQEQDKVILQFGKIGKDLFTMDYRYPISAFQSFAICLSSFDTKIACE

SEQ ID NO: 55262 - protein, 633 aa, Oryza sativa
MSARLLRRVLQERETAPQDPAAAAAAAEVEREEEEEASPPRVAARNPFDLLDEEEEEEEEKEDEVYSEQPVSYNEQKHSVNKKPGNAVPETNKKSKKKKKKSKADKQVSTKSRDEKSLDSILEDLSIEKKPMQQRVNQNERASGKEIEIDETTPGTSSILSIDPKHLKAENEMRRIFGSKVVDSLENQRNVPSSSTSRLRGVRRVAHNPRKTLLVTPSSYWPPWDKSMSMDIVETKSGFNYFRYIYDPSVSHVQDLFEVAKSANDLNAIAAILAKYPYHPESLLTFAELFKYSGEHQSSADAVEKCLFALECAWHPLFSPLHSNCQLKYSHDTNKPFFTALFSHMKNLDRRGCHRSALEVCKFLLSLDSDDPKGALFCIDYFALRSQQYKWLEQFAEEYQCDNSLWLFPNFSFSLAIARFYVERDATNGEASDHSDKSTSVDLMKQALMLHPLVLRKIVDKAPLKDSSWTQILRNVFFGSAKPGSPSLEHMISIYVERHYIMWRFPELQNLLKDAALLVIESLKQDNREAQDWACVRKEAFSSDKNEYSHLLVSDFSDTTPSLPPEELRPFMVAPGMAHEMPPAEQELGIEVRPRAPREVAGRNPALVFLESLLPWVDYGDNHHDENDQNNDD

SEQ ID NO: 55263 - protein, 44 aa, Oryza sativa
MFFFFLGGGGMARDFVFLVFLEGAEGKGGKLGLCSYKLVYIWGL

SEQ ID NO: 55264 - protein, 399 aa, Oryza sativa; identical to SEQ ID NO: 31745

SEQ ID NO: 55265 - protein, 178 aa, Oryza sativa; identical to SEQ ID NO: 42006

SEQ ID NO: 55266 - protein, 544 aa, Oryza sativa; identical to SEQ ID NO: 37655

SEQ ID NO: 55267 - protein, 325 aa, Oryza sativa; identical to SEQ ID NO: 32301

SEQ ID NO: 55268 - protein, 541 aa, Oryza sativa
MLARPGRLAASTLPNDSAAAAASTVLSILRGEDPASLPAAGIDPCPAVFQQLRPSLPTVPDSALPALARWAGEATAVSLLTSRGLFAAAWRLLLAPSPTPPPLAAFAPLVRRYARLGRAPAALRAFQFLRRHPDRYMAGGDIPAAASLLNMAVDALCKEGHPRAAVELFERWRREEPDSPPDERAYNILLHGWSRAGRLDKVGKLWAEMRLAGVRPTVVTYGTLIEGLCVKRRPDQAIALLDEMREEGIEANLLTCNPIVYALAQAGRFQDAHKVLEKFPLYGVAPNISTFNSLVMGYCKHGDLAGASSVLKVMTERGISPTTRTYNYFFMTFAKNSDVESGMNFYSKMIGNGYSPDQLTYVLLVKMLSRANRLELVVQMIQEMRTHGFEPDLATSTMLIHLLCRRHQFEEACAEFEDMFKRGIVPQYITYQKLMRELKRLGLVHLIQKLTNLMRSVPHSTKLPGSYRDKEGDDSMEKRKLILQKAQAVSDVLKECKDPKELGKLKEDEETDVEVADRLVANIRRSVYGGASTSSVMAPLS

SEQ ID NO: 55269 - protein, 839 aa, Oryza sativa
MAAAVAMRGSSSDGGGYDKVSGMDSGKYVRYTPEQVEALERVYADCPKPTSSRRQQLLRECPILANIEPKQIKVWFQNRRCRDKQRKESSRLQAVNRKLTAMNKLLMEENERLQKQVSQLVHENAHMRQQLQNTPLANDTSCESNVTTPQNPLRDASNPSGLLSIAEETLTEFLSKATGTAIDWVQMPGMKPGPDSVGIVAISHGCRGVAARACGLVNLEPTKVVEILKDRPSWFRDCRNLEVFTMIPAGNGGTVELVYTQLYAPTTLVPARDFWTLRYTTTMEDGSLVVCERSLSGSGGGPSAASAQQYVRAEMLPSGYLVRPCEGGGSIVHIVDHLDLEAWSVPEVLRPLYESSRVVAQKMTTAALRHIRQIAQETSGEVVYALGRQPAVLRTFSQRLSRGFNDAISGFNDDGWSIMGGDGVEDVVIACNSTKKIRSNSNAGIAFGAPGGIICAKASMLLQSVPPAVLVRFLREHRSEWADYNIDAYLASTLKTSACSLTGLRPMRFSGSQIIIPLAHTVENEEILEVVRLEGQPLTHDEALLSRDIHLLQLCTGIDEKSVGSSFQLVFAPIDDFPDETPLISSGFRVIPLDMKTDGASSGRTLDLASSLEVGSATAQASGDASADDCNLRSVLTIAFQFPYELHLQDSVAAMARQYVRSIVSAVQRVSMAISPSQTGLNAGQRIISGFPEAATLARWVCQSYHYHLGVELLSQSDGDAEQLLKMLWHYQDAILCCSFKEKPVFTFANKAGLDMLETSLVALQDLTLDRIFDEPGKEALFSNIPKLMEQGHVYLPSGVCMSGMGRHVSFDQAVAWKVLAEDSNVHCLAFCFVNWSFV

SEQ ID NO: 55270 - protein, 813 aa, Oryza sativa
MAGTRQTTSVPMDNAAVVDAKPLRTLTPMFPAALGLHTFTAKENSSSIVCITPFGPYAGGTEQAMPASIPPMFASPAAPADPNQRQPYAVHLNGAAPANGTANNTGVIPDLQIAVAGTVESAKRKRGRPKRVQDSSVPSAHLVPSAPGGNITAVQTPPSATTDESGKKKRGRPKRVQDVPVLSTPSAPQVDSTVFQTPASAVNESVTRKRGRPRRVQDGADTSAPPIQSKYNEPVLQTPSAVTLPEDGKRKRGRPKRVPDGALIPLSHSGVSIDDDSGEIITGKRGRPRKIDVNLLNLPSLFSDDPRESVDNVLMMFDALRRRLMQLDEVKQGAKQQHNLKAGSIMMSAELRANKNKRIGEVPGVEVGDMFYFRIEMCLVGLNSQSMSGIDYMSAKFGNEEDPVAISIVSAGVYENTEDDPDVLVYTGQGMSGKDDQKLERGNLALERSLHRGNQIRVVRSVRDLTCPTGKIYIYDGLYKIREAWVEKGKTGFNVFKHKLLREPGQPDGIAVWKKTEKWRENPSSRDHVILRDISYGAESKPVCLVNEVDDEKGPSHFNYTTKLNYRNSLSSMRKMQGCNCASVCLPGDNNCSCTHRNAGDLPYSASGILVSRMPMLYECNDSCTCSHNCRNRVVQKGSQIHFEVFKTGDRGWGLRSWDPIRAGTFICEYAGEVIDRNSIIGEDDYIFETPSSEQNLRWNYAPELLGEPSLSDSSETPKQLPIIISAKRTGNIARFMNHSCSPNVFWQPVLYDHGDEGYPHIAFFAIKHIPPMTELTYDYGQSQGNVQLGINSGCRKSKNCLCWSRKCRGSFG

SEQ ID NO: 55271 - protein, 246 aa, Oryza sativa; identical to SEQ ID NO: 30278

SEQ ID NO: 55272 - protein, 599 aa, Oryza sativa
MADGGGGEEGSASALRGSARRRGAVQPAGLDADELLTLMHGSDPVKVELNRLENEVRDKDRELGDAHAEIKALRLSERAREKAVEELTAEYEKLDEKLKLTESLLESKNLELKKTNDEKKAAMAAQFAAEATLRRVHAAQKDDDMPPIEAILAPLEAELKLARQEIAKLQDDNRALDRLTKQKEAALLEAERTVEIALAKAAMVDDMQNKNQELMKQIEICQEENKILDRLHRQKVAEVEKLSQTVRELEEAVLAGGAAANAVRDYQRKVQEMNEERKILDRELARAKVTANRVAVVVANEWKDANDKVMPVKQWLEERRFLQGEMQQLRDKLAIAERTARSEAQLKEKYQLRLKVLEDGLRGPPSGSSRPTEGKSIGNGPSRRLSLGGADNMSKISPNGMLARRSPSFNSRSSLSTSSSLVIKHAKGTSRSFDGGTRSLDRGKVLGNGPHLLNRSTDAVRDCETTDDWKAANTEEKGSEATNSSSTDTVSGVLYDMLQKEVISLRKACHEKDQSLKDKDDAIEMLAKKVDTLTKAMEVEAKKMRREVAAMEKEVAAMRLDKDQENKAKRPGNFKGPGTTSQAPHGRNAPRGGLTRNLQ

SEQ ID NO: 55273 - protein, 104 aa, Oryza sativa
MASLASPPLPCRAAATASRSGRPAPRLLGPPPPPASPLLSSASARFPRAPCNAARWSRRDAVRVCSQAGAAGPAPLSKTLSDLKDSCWRFLRPHTIRGTALGSM

SEQ ID NO: 55274 - protein, 1303 aa, Oryza sativa
MAAAAWGGTTQKCDSCGRTVYTVEELAADGRVYHRPCFRCTHCKATLQFSNYSSVEGVLYCKPHYDQILKSTGSLEKSFEGTSKSAKAEKSNGNKGQPNRFSSMFVGTQDKCVVCNKTVYPLEKVNLNGSSYHKSCFRCTHGGCTLSPSNNVTHEGKLYCKTHHSQLFMVKGNFSNFEDSTPNAKVDIEKQPEHEDATKNPGGPGQGDGLTEKPLESELTPEKPSQDDIVAEKQSQSSVDVPKQSESSTTVQRSEEGERVTKGESNSHVVSKKPLESSVEKPFQSSAVNLQPSGSSAAVRKPWQRNLPTDKPLLSNTTTEKSTPSSAAIEESLPSNGVDAKQPESSTASTVVKRPWQRRVATENLPQSISPSDKPSSTSADDVKPSENSKLIRKPWQRAVAAEAQIQNSGPTEKSSLTNDTKPSESTTSIKRPWEHKVVNEKPLQNNIDTEKPLQNNTDTEKSSSSAIDVKLAETSTTPTVPQEHSGITEKPSQTSADDVKPSESTAAVVKKQWQRNIGFQKQPQSSVTDAKTPESRGMGKRLWQRNVPTEKQSQSGASVVTPSQVSVASTNPLQSSVVVKKPWQRSVSREKEPEKDISSNKPLQNRVLAEEAEKTNVTADNKSQIIQDKKNNGATTENSSQISESAKKLPLTANKSQADTSTEKLSESDILAVASSQITEPSKKPSENTAENEKPSQTDIATDELPLTQSVEAMSEPSPSDAAHQEISEREILTDKLPESTMAVEKLSQTATLTEKPSKEDAAEKLPQTNEPSEQPHESEETAEKPLQNEANAESTTKQSDLSLEKPPQVDANVGNPTEPESDATSGVNSSDAQIRPTAEQLVGPQGIVSAEKTSDQILEANTDPAADQSSESQDVAPAKVAMEQPLENQKAAASEQPLEPQHEAYEENPQEHNSDATAKESSEPERDTASDQLAEQPSESRTAGEKATLRESDVVTEDPAEPQIDAAAERSAEVLSESQTGVETPVLHQSDRTNEVPSEPQTDEASDKSTEQPLEPENDASVEDEKPPEIESDDVHDKPSESTPDTETLPHNTPKSSISISEAADGNVSEEAPPQSSASIETPSESAIAVEEPKHDDEASIKPSEDSSALEEPPQDDSASVEPSENTITLEKASEEDEGSVKPSEGNDALEKTLEEDEASAKLPEDSTTFEKPSEKDDAGTKQTEDPVTLEKEPEEDKGSVEPTQDNAGLEKPLEEDEASAKPSEDSVVLDKPSVEDDDSAKPSEDSMDLEKPEAHKPSEEEDGATKSSPEDAAVEEAPLQGDTETATDKPSLEADTTETA

SEQ ID NO: 55275 - protein, 304 aa, Oryza sativa; identical to SEQ ID NO: 29737

SEQ ID NO: 55276 - protein, 425 aa, Oryza sativa
MQMRFTKMSWGAAARGIQTATGFVTSVNTWAEFFNCLSSAISSACSWINIHQKPQNDFVKEEIQHLQSDLWQLQTTLPKMRNLVEILEWQIYKKPAAELLPHIKDALLDAEDIIDEFNYYELKAKIEGRIEECLTSSGCQEFYMSVIRGSFNRVKEIQEKLDHLHRQSMDLGLHCAAQRFDKIVRPETSSFLNSQIFGRQEEEKMVLELLGVQLQANAGYKRKRSSRVEVLPIVGLGGVGKTTLAQQICKNQMVKAHFDMILWACVSDDFNAKRLTKEVIQSSKKETSFDNLDSLQSILKDTVELKRFLLVLDDIWDDVMADGGQDWQRFCAPLSNALQGSMILITTRSQKVADKVRTMDCFPLEGLTEDVFWEFFIVQAFGTESLSKYPDLEDIGRSIILKLKGSPLAAKTIGRLLRTNLHASH

SEQ ID NO: 55277 - protein, 172 aa, Oryza sativa
MSRAAHRCCRRSPPSSQPPPASRAAPPQRQVQPHRAVRHRLEPEPVPPTQRPAAAAARSWLCSVLTNVTGTLRECSSSASFNVGLMCPEHGNGNSIACALLPSPMASANNNDEDEDEDEEESHMGTGVRGCCGAAAHEVGGMERSGDGRSGATARRSSGGWSEVTARRSGGA

SEQ ID NO: 55278 - protein, 213 aa, Oryza sativa
MAGAMTMSRRRLSHALLLVLAILPNLAALAVAAGGGSGGGGFFPHRSLLQSSSCQPSGAITGTSGDCNADNGSECCQDGVQYMTYACSPPVAAGGTGTAALLTLNSFADGGDGGGAPSCTGRFYDDGQLVVALSTGWFDGRSRCEKDVVIRASGGASVTAMVVDECDSQRGCDSDHNFEPPCRNNIVDGSPAVWDALGLNKDDGEAQITWSDA

SEQ ID NO: 55279 - protein, 433 aa, Oryza sativa; identical to SEQ ID NO: 42036

SEQ ID NO: 55280 - protein, 229 aa, Oryza sativa
MQIFVKTLTGKTITLEVESSDTIDNVKAKIQDKEGIPPDQQRLIFAGKQLEDGRTLADYNIQKESTLHLVLRLRGGMQIFVKTLTGKTITLEVESSDTIDNVKAKIQDKEGIPPDQQRLIFAGKQLEDGRTLADYNIQKESTLHLVLRLRGGMQIFVKTLTGKTITLEVESSDTIDNVKAKIQDKEGIPPDQQRLIFAGKQLEDGRTLADYNIQKESTLHLVLRLRGGL

SEQ ID NO: 55281 - protein, 550 aa, Oryza sativa
MAAPAAESAVVGVGVDSATSAAVRDGFAELERQQQLLATCTRLYQQLTEHFGSLERRLAARSETLRTKRRFLDVRTSRRLEALRRREASIDGSVSLALSRLDSLAKGDAGTTGSASADAAGIAEGLRSLCASMDSAGFFTFVVARRKEVDALRAELPDALKRCVDPARFAMDAVSEVFPIDKRAVRSPTDLAWACVLILEAVVPSLADPDPEIGAARPMVPQAARERARGMAREWKDAAEKKGGVEGAKPPDAHAFLQHVATFAVAEKEDKELYRRIVVSFSWRRQMPRLAITLGLEDEMDDIIEELITKGQQLDAVNFAYEAGLQEKFPPAPLLKAYLEDSKKIPSNSDNLSTSTGQSGSNANKKEQSALRAVIKCVEDHKLEAEFPLEDLRERLEELEKAKTEKKKAASSSSSGGSSGPANKRIRASTGGPMPPAKAGRLTDYTGTPSSPATTTTNATFIRSPSHASYGTASPYSYDRPAAHPLYCGQNTLAMREPYAYHHPSEVSSVGLGMSYPSPPITYPAYAGYSNGIGYSNAMAPAFHHQAYYR

SEQ ID NO: 55282 - protein, 729 aa, Oryza sativa
MGPLLRSSPPPRHLRLLLRRLLSTAAGRPSRLLPLPASSSARLLVRPRVAVAAAAAGAPLRRNGVAVRAFMASTAASEAMREKRVAGEYTAANVQVLEALDGVRTRPGMYIGSTGSRGLHHLVYEILDNAVDEAQAGYATKVDVILHGDNSVSVTDNGRGIPTDIHPQTKKSCVETVLTLMHAGGKFGGSKSGYTVSGGLHGVGLSVVNALSEALEVTVWRDGKEYRQNYSRGKAITMLTSRTLSDESSSRQGTRIRFWPDKHIFTTTMDFDFNTIAGRIRELAFLNPELTIALTKEEDDLQVQHNEYCYAGGLVEYVKWLNTDKKSLHDPIAFRKEMDGITVDVSLQWCSDSYSDTVLGYANSIRTIDGGTHIDGLRTSLTRTINNFAKKSKTLKDKDISLSGEHVREGMTCIIAVKVPNPEFEGQTKTRLGNPEVRRIVEQSVQENLTEYLELHPDVLDSILSKSLNALKAALAAKRARELVRTKSVLKSSSLPGKLADCASSDPEESEIFIVEGDSAGGSAKQGRDRKFQAILPLRGKILNIERRDEAALYKNEEIQNLIVALGLGVKGEDFNKEALRYHKIVILTDADVDGAHIRTLLLTFFFRYQKALFDEGCIYVGVPPLYKVERGKQAHYCYDDADLKELVNTFPTNASYHIQRFKGLGEMMPAQLWETTMDPERRMLKQLKVEDAAEANVVFSSLMGTRVDVRKQLIQNAASMVNLEHLDI

SEQ ID NO: 55283 - protein, 663 aa, Oryza sativa
MASTPNGLARIETHGAKTKKHENGICHDDSSAPVRAQTIDELHSLQRKRSAPTTPIKDGASSPFAAALSEEERQRQQLQSISASLASLTRETGPKVVRGDPARKGEAAAKGAPSPHPQPVHHHHPHVTPTIAVSDSSLKFTHVLYNLSPAELYEQAIKYEKGSFITSTGALATLSGAKTGRSPRDKRIVKDEASAQELWWGKGSPNIEMDEHTFLTNRERAVDYLNSLDKVFVNDQFLNWDTENRIKVRIISARAYHSLFMHNMCIRPTEEELEEFGTPDFTIYNAGQFPCNRYTHYMTSSTSVDINLARREMVILGTQYAGEMKKGLFGVMHYLMPRRGILSLHSGCNMGKQGDVALFFGLSGTGKTTLSTDHNRLLIGDDEHCWSDTGVSNIEGGCYAKCIDLSQEKEPDIWNAIKFGTVLENVVFDEHTREVDYTDKSVTENTRAAYPIEYIPNAKIPCVGPHPKNVILLACDAFGVLPPVSKLNLPQTMYHFISGYTALVAGTEDGIKEPQATFSACFGAAFIMLHPTKYAAMLAEKMQKYGATGWLVNTGWSGGRYGVGKRIRLPYTRKIIDAIHSGELLTANYKKTEVFGLEIPTEIDGIPSEILDPINTWTDKGAYKETLLKLAGLFKKNFEVFANYKIGGDSSLTDKILAAGPNF

SEQ ID NO: 55284 - protein, 91 aa, Oryza sativa
MLLYWRLWRKLHPQMSLNALLLDHPQPLEHQGLVLFSSNFFLHASVSRFFLFKQSGYLFQEHSRCFFPCIVFNASLAFEFSHPGRFSCIRG

SEQ ID NO: 55285 - protein, 761 aa, Oryza sativa
MAPPTPAPTKCLTECPNNNLTWATASSSHITEDTAPTAAWELGNNKHKGHASCVVTKDSPEVTPTMCSTKCSGPTVEPDLTVAAVVTSATTVVASMELVAAGNAIGATYINNLDHPKVTHAKCSMSGSGVKRGTEQVVLAFPLMASPVEFTTSLVEPSPPTGLKLGAAICVGDQVPMKCSMKCTESDNKPLMEHPKRNPWPPAWLGWKKWYVSWTVVNYSDMRFYFIPPWPPPLKVGWLALVFSKFGAAHTDMMDIMLHWTDMKPWPPPNQNLRSIMVHLFAWKHWKVSVEVSLFAWNTKQYMNSVLLITVGTKWLIHSAVKDCFLQGKPFKLVDPLELMQVIFVLLVRDPDVEMFQIGSYSLQPENYQLTNYLVARLLKQGNLKKVLDGVDHSKNIKKSDVDVGEDNPGNISTAAKMFIDGLGIKEDSDMLCPSAQYIDNWSTKLLDEIRNGCNIYLLVALIDDELNPWCFLIDKIWYDILVLLFFTGATWKVESYALPIKDVIHMVVYFVQPLQGILLQTRQGKIENPVILDITSATQTVKFLLCYKSTIKIYPSCSSMVQISASKFRACGKENICYMLLLLVLNIGDCTFLRSTSYMLHASIACAEYWCLHFSEVVQHAICIGWIINWAILFWMEQAVCSPRIILQMPWDPGGGKLFIASGCRLGDKPDSKEGVLLGIGPAALRPNTVSSPILGPSKPNRELERKGCCTLRKRNRTEIKHASAASATTAAAATWFRLNLVDLPLFLYYLSCYYLYCSY

SEQ ID NO: 55286 - protein, 366 aa, Oryza sativa
MVSVNLGLVHYVLDHIYGTVLHRTKLGTPFFSKGWGGTKLDLLEKMVKQLFPEARCQNWPPTAVQPMWKTVWETKSSCLREGVFRTTCDPRLIEALPPESHNARVAFLTPKSVSPEKMACVIHLAGTGDHSFERRLRLGGPLLKDNIATMVLESPYYGQRRPSMQHGSKLQCVSDLLLLGKATIDEARSLLYWLQNEAGYGKMGICGLSMGGVHAAMVGSLHPTPIATLPFLAPHSAVVPFCDGLYRHATAWDALRKDAATLAQDVTSLTEDMAQKSGITIEQVRERLRSVLSLTDVTRFPVPKNPQAVIFVGATDDGYIPKHSIMELQKAWPGSEVRWVTGGHVSSFFLHNDAFRKAIVDALDRL

SEQ ID NO: 55287 - protein, 271 aa, Oryza sativa
MSPPLEPHDYIGLSAAAASPTPSSSSCSSSPNPGGEARGPRLTLRLGLPGSESPEREVVAAGLTLGPLPPTTTKAASKRAFPDSSPRHGASSGSVAAAAACQDKAAPAAAPPAAKAQVVGWPPVRNYRKNTLAASASKGKGEDKGTAEGGPLYVKVSMDGAPYLRKVDLKMYSNYEDLSMALEKMFSCFITGQSGLRKSSNRDRLTNGSKADALQDQEYVLTYEDKDADWMLVGDLPWDLFTTICRKLKIMRGSDAAGIAPRSIEQSGQSR

SEQ ID NO: 55288 - protein, 160 aa, Oryza sativa; identical to SEQ ID NO: 33409

SEQ ID NO: 55289 - protein, 45 aa, Oryza sativa
MRGGNSWISLSWVWSCTSGRKDPTPDVILPPPHSSSSPVKVVCRD

SEQ ID NO: 55290 - protein, 306 aa, Oryza sativa
MQQQQAWAAGLGGLAVAGVGEEGGGGGPAPTTVDEASMERSKSFVKALQELKNLRPQLYSASEYCEKSYLHSEQKQMVLDNLKDYAVRALVNAVDHLGTVAYKLTDLYEQQASEVSTLELKVACLNQQVLTCQTYTDKEGIRQQQMTGTATRHHKHYIVPTLANKRMQAFSEMQTDADIDSRPRPYPSAKTLFWHLASEKNSKTNGARQSEFVLEETKATKPASRGKEPSTSPLPKHLQTNLASSDFAMHNVGMKDQPGVRHLSSFSSFDNPRGRQIQKAPLRTKSMLAAFFVKHKSGKMKNVSVR

SEQ ID NO: 55291 - protein, 292 aa, Oryza sativa
MQVLDHPNVACLKHYFCSTTAKEELYLNLVLEYVPETVHRVIRHYNKMSQRMPLIYVKLYMYQICRALAYIHNCVGVCHRDIKPQNILVNPHNHQLKLCDFGSAKVLVKGEPNISYICSRYYRAPELIFGATEYTTAIDVWSAGCVLAELLLGQPVFPGDSGVDQLVEIIKVLGTPTREEIKHMNPNYTEFKFPQIKAHPWHKIFHKRMPSEAVDLVSRLLQYSPHLRCSALEVLIHPFFDELRDPNARLPNGRTLPPLFNFKPRELKGASMEFLVKLVPQHAKKQCAFLGL

SEQ ID NO: 55292 - protein, 628 aa, Oryza sativa
MLKTRNLQKYKNGLQIFPDMLDVLLAERRVDEALDALDEAERLASDAKLKQTLTATEIAALRRAVSDNRQKLADQLAEAACQSSTRGIELRAAASALKRLGDGPRAHSLLLNAHNQRLQCNMQTIHPSSTSYGGAYTAALAQQVFSVVAQALSDSVEVFGDESCYASELVTWATKQVMSFALLVKRHVLSSCAAAGGLRAAAECVQISLGHCSLLEARGLSVAAVLLRQFRPSLEQALYSNIRRIEESTAALAAADDWILTYPPTGIRPLARSSAANLALQPKLSNSAHRFNSMVQEFFEDVAPLLSLQLGGSTMDDITKIFNSYVNLLISALPGSMEDEANIDGLGNKIVRMAESEEQQLALLANASLLAEELLPRAAMKLSSMNHSSMDDLRKRGSDKQNRMPEQREWKRKLQRMVDRLRDSFCRQHALELIFTDEGETHLSADMYISMDNTVEEPEWAPSLIFQELYAKLNRMASIAADMFVGRERFATLLMMRLTETVILWLSEDQAFWEEIEQGPKPLGPLGLQQFYLDMQFVIIFGQGRFLSRHVHQVILDIIDRAMAAFSATGMNPDSVLPGDDWFMDVSQEVVSMISGKGRAANGDREINSPTASVSAHSMSSFRSHGSS

SEQ ID NO: 55293 - protein, 220 aa, Oryza sativa
MGISRDSMHKRRATGGKQKAWRKKRKYELGRQPANTKLSSNKTVRRVRVRGGNVKWRALRLDTGNYSWGSEAVTRKTRILDVVYNASNNELVRTQTLVKSAIVQVDAAPFKQWYLTHDGVDIGRKKKAPAAKKDAEGQDAEATTEEAKKSNHVVRKLEKRQQGRTLDAHIEEQFGSGRLLACISSRPGQCGRADGYILEGKELEFYMKKLQRKKGKGASA

SEQ ID NO: 55294 - protein, 147 aa, Oryza sativa; identical to SEQ ID NO: 33733

SEQ ID NO: 55295 - protein, 757 aa, Oryza sativa
MASLKSPVAAEEQAATAAAAAAKGEGERCPVEEVALVVPETDDPTTPVMTFRAWTLGLASCVVLIFLNTFFTYRTQPLTISGILAQILVLPAGQFMAAVLPSREVRLLGGRLGSFSLNPGPFNIKEHVIITIFANCGVSYGGGDAYSIGAITVMKAYYKQSLSFLCALLIVLTTQILGYGWAGMLRRYLVDPADMWWPSNLAQVSLFRALHEKEGGDGGKGSSSRGPTRMRFFLIFFFASFAYYALPGYLLPILTFFSWACWAWPHSITAQQVGSGYHGLGVGAFTLDWAGISAYHGSPLVAPWSSIANTAAGFVMFIYLIVPLCYWKFDTFDARKFPIFSNQLFTASGQKYDTTKVLTREFDLNVAAYESYGKLYLSPLFAISIGSGFLRFTATIVHVALFHGGDIWRQSRSAMSSAAAKMDVHAKLMRRYKQVPQWWFLVLLVGSVAVSLVMSFVYREEVQLPWWGMLFAFALAFVVTLPIGVIQATTNQQPGYDIIAQFMIGYALPGKPIANLLFKIYGRISTVHALSFLADLKLGHYMKIPPRCMYTAQLVGTVVAGVVNLAVAWWMLGSIDNICDVEALHPDSPWTCPKYRVTFDASVIWGLIGPARLFGRHGLYRNLVWLFLAGAVLPVPVWLLSRAFPEKKWIALINVPVISYGFAGMPPATPTNIASWLVTGTIFNYFVFKYRKGWWQKYNYVLSAALDAGTAFMGVLIFFALQNAHHELKWWGTAVDHCPLASCPTAPGIAVKGCPVF

SEQ ID NO: 55296 - protein, 87 aa, Oryza sativa; identical to SEQ ID NO: 34815

SEQ ID NO: 55297 - protein, 221 aa, Oryza sativa
MMMETELCSSRVLSPPRYESGDEELSVLPRHTKVIVTGNNRTKSVLVGLQGVVKKAVGLGGWHWLVLKNGVEVKLQRNALSVLEPPTGNEDDDDIDGNNSFCSSSDMGDKDMDYSSIEYHKPTKPRVRHTRPWSSCIKSSNRGNFHPSTKLRTRVNLTKLGTPTLWRYWKHFNLVSMNPNPSKEQLFHGVQQHFQSQQLDELQVILGFIQAAKRLKTLYRS

SEQ ID NO: 55298 - protein, 211 aa, Oryza sativa
MRGSFKKRGVRKTTYMVTKTNLLHLPTGRNLRKSGNGWRKRSGGSLQEEKEDVTKKKDLSDFYFGLSKNVAFGAQTHDNTKHAKPEKLDEKVQDAKTSKVGAEVSDRSPKHKRDSGEGAETANESRSVEEPATTQSRDSAAARSTEKNADVSLDAPQTQTPENTQPAPQTQNPQNTQPAQITDEHYKRNANALAAARERALARKKAKAQQI

SEQ ID NO: 55299 - protein, 470 aa, Oryza sativa
MAVAPPEVGPAAAAAVAGGKKEVRALDGASAIGEEEEVEVEVEEEEEAEEEREDEEEGEEDGGDEEEEEEEGVKWLKHYSSMQSILVVGDGDFSFSRALAVAFCSGENLVSTSLDSYEALRGKYANAESNIMVLKLMGATTLHGVDAKTMKHHTDLKMRRFDRIVFNLPHAGFKAKEGDMRMINLHKDLVRGFFRNARCLLRPSGEIHVSHKRGKVYENWEIEKLASESSLIMVEKVDFHIEDYPGYNHKRGDGPRCDEPFPLGPCCIFKFSIRNHKKQKKCHSKKIGSIPSLGGSHVHPEILASDWSPSQPFRPVNAVNMPVTFDPYSLRIAQSHQPGFPVNFVGLWTAAACSLQHCNIHPMLNIVRPSLHLLPIASIIAPQMGRITSTSLFAPQEQPKPVLRPLQSVSSYDLAREHQMNLRREFEMRGQTMPAGTSLDYFEFLEYLFRDPAEKEKWLQTMITLHATRW

SEQ ID NO: 55300 - protein, 35 aa, Oryza sativa
MKLKLGLKQLKYLANFSLYLESLSWNHLNLFSMSS

SEQ ID NO: 55301 - protein, 406 aa, Oryza sativa
MGCFLGCFGGAKERRRRRKRSPAHSPSGRARATPRLSPKKAAAAAALDGDVVSAAAPLLATLLELRDSTDDLCLTVIKKKVAFDPNVTTYEAAAIPEAEEEDDEEAEPAAGDDKDEARWMLAPDCAKSEAFPLNHRYSNCAYGDNDSEYDEDEDEDEEEDEDEEEEADGLDECAIDDEDDDGLLGIGRGEDEACESLFLLPMSKTKESGGGHEAASGVTSPEAPPAPQQTRDANPVLSSVENLTQWKDAKARAATATAAPNASDKENRTTANLLPEPAIPAKKREWQVVCSDYSPSTPSKQEVSVDASLSTWLGSSGTPESNSVRSFSPISREDRPILGALTVEDIKISSANSSPRRSRSPSPSPDDMPILGTVGAYWNCSSKAGDPVTRGGFMRTRTRFGQNFAG

SEQ ID NO: 55302 - protein, 175 aa, Oryza sativa; identical to SEQ ID NO: 30342

SEQ ID NO: 55303 - protein, 395 aa, Oryza sativa
MRHLARLLNNRILLPASSSPAAAFSKRTYARRTKPAPPTADAAAPAAVEGEGEEERGPGWQREKLPAEIPRPSTIAFQPRVANAVRLVGTVGAPVQLQRLPDGRFSAVSVLVQDRHADYPKFWIPIIFQDDLAQVAASHLQEKDHIYVSGQLTGDIPPTKLMDGQANIQVLAQMLSFVGGKAVQADSMVDEEEGFMQIVEAEKKVETKKFIPKYPPRTVSGYRNKDKLNKLWNDVVANPQDWTDNRPQKKNGSINAKYPDFKNNVSKEALWLDTAPKAVLEKLDDLVFSSDFSAAKKYRPFGGDKGNGTNWAKKSQDSSSISKQKQGELWQDLVDNPGKWWDNRSDKPSIKYPDFKHKENGTPLWIGSQTPKWAIDALPPAKPSKAPFKQETFLS

SEQ ID NO: 55304 - protein, 244 aa, Oryza sativa
MAGGGGQSAIAAEDDDLERGAERDEEEEEGSQYFTDAEDHQSWASHSRHNSTAYEDYISTCASVRASSYDGEAEEEEDAGGGGGGVEHHRRKSSCVSECSLDDVDLEAGLAEVIKGSPEKAERCCRICHLGLETAAAESGAGITLGCSCKGDLSYSHKQCAETWFKIRGNKICEICSSTACNVVGIGDSESVEQWNESNSTAPAQAPPAETQRFWQGHRFLNFLLACMVFAFVISWLFHFNVPG

SEQ ID NO: 55305 - protein, 372 aa, Oryza sativa; identical to SEQ ID NO: 31528

SEQ ID NO: 55306 - protein, 478 aa, Oryza sativa; identical to SEQ ID NO: 32986

SEQ ID NO: 55307 - protein, 151 aa, Oryza sativa
MLRHVMLILMDIFLHMVLNTLPSNEGRLEALLFEAKGEWTDAERAYALILENNPFDQIVHKRKIAIAKAQGDMALAVEYLNKYLELFMADHDAWRELAETYVALQMYKQAAFCYEELILAQPTVPLYHLAYAEVSELCQTHPSFSQSLKEK

SEQ ID NO: 55308 - protein, 408 aa, Oryza sativa
MAAAAEAVTEVDATNEEGEEEEQVVNPWEVSAGKGGIDYDKLVDQFGCQRIDDALVARVARLTARPPHRFLRRGLFFAHRDLNEILDLYEKGEKFYLYTGRGPSSEALHLGHLIPFMFTKYLQDAFKVPLVIQLTDDEKFLWKNLTVEETKRLARENAKDIIACGFDVERTFIFSDFNYVGGAFYENMVKVARCVTYNKVVGIFGFTPEDHIGKVSFPPVQAVPSSPSSFPHLFSGNDQLRCLIPCAIDQDPYFRMTRDVAPRIGYQKPSLIESRFFPALQGENTKMSASDPNSAIYVTDSAKEIKTKVNKYAFSGGRDSIELHRKLGANLDVDVPIKYLNFFLEDDNELEHIKKEYKEGRMLTGEVKQRLVAVLSELVARHQRARALVTEEMVDVFMAARPLPNMFG

SEQ ID NO: 55309 - protein, 111 aa, Oryza sativa
MTLSRLSNRMGAIMLRTPYRVGCSQSEKRRITLSSSPKCQVPILVRSAERIRSSYYRRQRPPKCQIPPQCIGSSLCREGGGRGDGEGEEEEEEKGESENVSLSMGKEMQIS

SEQ ID NO: 55310 - protein, 621 aa, Oryza sativa
MEVGGPQDALDNRSDDNDFDKNDNSDPVVYQLVRVEGDGTLIPATEDEVLQFETFLHDEKVDDDLPSIDDVTHVEEYFTNDCIVKKPEFEEGPSKLDTADVQTQKLDAGLEEDRLCTLNDSIVLPSNCSAVHDQQLDKLNTEQGANIIAQQDNASTETTKSTVLNDLSSDKEKADACSKPVNEASAGQSVSGVTSSVPDFSILKGEVCLDDLTMRELQEAFRATFGRQTTVKDKLWLKRRIAMGLINSCDVPSSGCVVRDYKVIAMGAKQEIPVVEAIPKMELEANLVRDQVMNPGHERDLPSSLSYHSEEQQRSSKRLKRVPTDNDEPQVTIFAEQGTTKRIRKPTKRYIEELSDIDTHESTGRLSSPGKRHVYDEVLLRPRIAPLHEVDSLSTAYPTREDTLGGCSVHVPYVSRMRRGRPRSNFIPFLDPEPSVECTEAPAADVVNLEKEGERKNHKNTGKKGVHVETSCEKDVQGLQDKDFCDSDDNPKTKRGGKRKHHRAWTLCEVVKLVDGVARYGAGKWSEIRRLAFSSYSYRTSVDLKDKWRNLIRASQTQLSTENDGVCPRKSNPSAIPIPVSILLRVKKLAEMQSQAGDVGVPIKFSGQSTTVVQGKVSGFL

SEQ ID NO: 55311 - protein, 689 aa, Oryza sativa
MAEKGRTEMEVRPGGVALITISNPPVNALSIHVLYSLKDHYEEALRRNDVKAIVVTGKGGVFSGGLDINTFGAIQRNKAEQLKVDYVSIDVMTNTLEAAGKPSVAAINGPALGGGLEISMVCQARISIPTAQLGLPELQLGVIPAFGGTQRLPRLVGLTKALEMMLMSKPIKAEEAHQLALIDAIVSPNDLLNTACRWALDISESRRPWVHTLSRTDKLESPDEAREILKFARAQVQKQAANLRHPLVCIDVIEEGIVSGPQAGLRKEAIAFQDLVFSDTCKSLVHVFFSQRATSKVPGITDLGLMPRKVSKVAIVGGGLMGSGIATALMLSNYPVVLKEVNDKFLDAGIDRIKANLQSRVRNGKMTKEIYEKTLSLLTGVVDYERFKDVDLVIEAVVENVKVKQQVFADLERYCPSHCVLATNTSTIDLDLIGEKTNSQDRIAGAHFFSPAHVMPLLEIVRSNHTSPQVVVDLLDVGKKIKETPVVVGNCTGFAVNRMFSPYTSIALLLVDRGMDVYKIDQVCTEFGMPMGPFRLLDLVGFGVALASGMQYLENSPGSVDKSMLIPLMFEDKRTGEASQKGFYKYEGNRKAIPDPDIFKYVEKSRRMAGTVPDLELLKLDDKEIVEMVFFPVINEACQVLSEGIANKASDLDIASIFGMGFPPYRGGIVYWADSIGAKRIHAGYQSGR

SEQ ID NO: 55312 - protein, 336 aa, Oryza sativa; identical to SEQ ID NO: 32248

SEQ ID NO: 55313 - protein, 454 aa, Oryza sativa
MLPSSRYLLAPAPLPAMVVRPPPPHPPSRGTSPLARPPLCRAMARAAPSLSAAASTAASSSTTPAKKKVLLPIAMGTEEMEAVILAGVLRRAGADVTLASVEDGLEVEASRGSHIVADKRIAACADQVFDLVALPGGMPGSVRLRDSVILQRITVRQAEEKRLYGAICAAPAVVLMPWGLHKRKKITCHPSFIEDLPTFRTVESNVQVSGELTTSRGPGTAFQFALSFVEQLFGPCKAEDMDNTLLTKVDDNLERSIEVNEIEWSSDHNPHVLIPIANGSGEMEIIMLTDVLRRANVNVVLASVEKSTSIVGSQRMRIVADKCISDASALEYDLIILPGGPAGAERLHKSSVLKKLLKEQKQTGRMYGGICSSPVILQKQGLLQDKTVTAHPSIVNQLTCEVIDRSKVVIDGNLITGMGLGTVIDFSLAIIKKFFGHGRAKGVANGMVFEYPKS

SEQ ID NO: 55314 - protein, 265 aa, Oryza sativa; identical to SEQ ID NO: 28628

SEQ ID NO: 55315 - protein, 154 aa, Oryza sativa
MLLQGSPCPSSCSASPTSSWAGSSSSSPSSPPCTSGNSSCPSPPSGYGASLLLGALLGCATCSPSGSSLMLMDMAPPSMALCLLPTPSSPVFLSEEPFSGTSPTSGTSIPLPDLLPMLLLPLHSGLLAWKLVSTEGLEAWIVCKSLRYIPLKLP

SEQ ID NO: 55316 - protein, 89 aa, Oryza sativa; identical to SEQ ID NO: 48122

SEQ ID NO: 55317 - protein, 614 aa, Oryza sativa
MTKSDLVNNLGTIARSGTKEFMEALAAGADVSMIGQFGVGFYSAYLVAERVVVTTKHNDDEQYVWESQAGGSFTVTRDTSGEQLGRGTKITLYLKDDQLEYLEERRLKDLIKKHSEFISYPISLWTEKTTEKEISGDEDEEEKKDAEEGKVEDVDEEKEEKEKKKKKIKEVSHEWSLVNKQKPIWMRKPEEITKEEYAAFYKSLTNDWEEHLAVKHFSVEGQLEFKAVLFVPKRAPFDLFDTRKKLNNIKLYVRRVFIMDNCEELIPEWLSFVKGIVDSEDLPLNISREMLQQNKILKVIRKNLVKKCVELFFEIAENKEDYNKFYEAFSKNLKLGIHEDSTNRNKIAELLRYHSTKSGDELTSLKDYVTRMKEGQNDIYYITGESKKAVENSPFLEKLKKKGYEVLYMVDAIGEYAVGQLKEFEGKKLVSATKEGLKLDESEDEKKRKEELKEKFEGLCKVIKEVLGDKVEKVVVSDRVVDSPCCLVTGEYGWTANMERIMKAQALRDSSMAGYMSSKKTVEINPENAIMEELRKRADADKNDKSVKDLVLLLFETALLTSGFSLDDPNTFGSRIHRMLKLGLSIDEDETAEADTDMPPLEDDAGESKMEEVD

SEQ ID NO: 55318 - protein, 530 aa, Oryza sativa
MNEEVVSAGSPLKASSSPPPLCSFGIWSDQRKSPRLPWWKQQFISESEEDDDEVMPPASHVVEDSDEGEEEEDDDDDDDDDEKVVPPPTPTPPPPQAPEEEEEEARALRRSLLSLIHIDYIEAIRRLPAADLRTALARGVLVGGHCYGPLHHPADNILLNSIWYAAAFPLHADDRIDVAVITANSLSRAVQRSLDGLVASLRHRRPDLSRDDALRHLRADLRAAVASARGSPPPRLPAESDSEAEAAAYRAAQHPKPAALAHFLATVLPAVVTDAASVLAGKPSLSSSDIARVSAMLAPSPLPDEPPQPPLRERSPKIIRIINDRRNNLRGWYKILLQLANAALRKYAQQTGEEYELHTIYGETFLKDRNERAEYIHINFMASPSSCQCLQASPVCFFAEVLRPPRFKYHEADITLCCIVRPSPNDADSCHGCLIENHRIDHPEAGMRFCGKKHSKMDPNGYGHGWDWPSIADVEYRFFDPDKDVGLVEYLDGVITDIKARIRDLSIRDEDDSDEDSSDDDISGYSMRFV

SEQ ID NO: 55319 - protein, 466 aa, Oryza sativa
MAVSSELEGLQDVEPSRFIAFSFPNPLLLLDHASDPYAHGGHEFLRVAVLDHSSPHPSPRTAAMLVPAGRHRDWIFSTRAGHLHLLLASRSQCSHLSRLILVGPELSAPSPSRVVVVAAAARPDPDPAHARLLPLLLALCPRAAFGGDAIPDVPLLSFHDDLLRLAPVKVVAGPVVGEMVVEDVAVDCAPRSAELRRRLRFKRMPFLVQTQVRLVRQLSPGDSLMLDALDEVGGGSLQPEVGGELVQPYLQAMAAGLAVIAPSMDESFRLGGKPRCLCAGIGGGALLMSIRMGLQCDVLGIEADGVVLDVARSHFGLVEDEFLQVRVGDAIQMIQDFAHQGDPDMNFSAIMVDLDSSDAICGVSAPPLEMTKESILLASRTILHRDGAFILNVIPPAADGSFYKGLIDVLRHVFSELYEINVSNGENFVLVATVSPVETILADSSGSVLTKLRKLAGDFLEHITRI

SEQ ID NO: 55320 - protein, 521 aa, Oryza sativa
MAEGQDGYFDSSTDSLRVEPIYESFLCPLSKQVMRDPVTIESGATFEREAILKWFKDNGSGGRRLVCPVTNKELSSTELNPSIALRNTIDEWMHRNEAAKLDVARKSLTSDCSEGDILQALEYVAEICQRSRSSRHLVRKVGLISLITDLLKNSSPKVRQKALGSLRFVAKNDNDNKNEIAAGDNIRTIVKFLNHGHSQEKEQAVSLLYELSEYKPLSEKIGSVSGAILILVGLSSSKVENLLTVDRAEKTLENLESCEKSVRQMAENGRLQPLLRLLLEGSSDTQLSMAAHLGELVLSNDVKVLVAQTAGSTLVNIMKSGNREAREAALKALNQISSYDTSAKILIEAGILPPLITDLFTVGSNQLPMRLKEVSATILANIVASGASFESVPLDHNRQNLVSEEIVHNLLHLISNTGPAIECKLLQVLVGLTTSATTVQSIVDAIKSSGATVSLIQFVEAPQREVRLASIKLLNNISPFMGQELAEAFRGNFSQLSSLVRVIADNNGISEEQAAACWPHS

SEQ ID NO: 55321 - protein, 311 aa, Oryza sativa
MGVPEEEELKYTMDKISDNFSNYSAWHNRSILLSNLLIKQSKGFESKQKIFSEEFELVTQALFTDPSDQSGWFYHLWLLAQTSSPENPQLIASWPSNGSNLSLSSLSSICCYSLKEGILPIVLYFNEPVKGLSSSSVSLNSDLVVSKNIQWRPLSVTDSGHSNCWVTYLEVSNLECNSLQQFSVEVSITNSDEIVSRSGSNYNCPVHFSFTFELSNNDSTAKDIDPIHELISWDFSEPLLSHVNPSCICFEQLKITNSLVHKESNWHLERLSDEIDLFRELHDDNSKFAKLTLARLLLACACNKVPWKFSC

SEQ ID NO: 55322 - protein, 578 aa, Oryza sativa
MADEAKAKGNAAFSAGRYEEAARHFTDAIALAPGNHVLYSNRSAALASVHRYSEALADAEKTVELKPDWAKGYSRLGAAHLGLGDAASAVAAYEKGLALDPTNEGLKAGLADAKKAAAAPPRRPPPSGVDGIGQMFQGPELWTKIASDPTTRAYLEQPDFMQMLRDVQRNPSSLNMYLSDPRMMQVLGLMLNIKIQRPEASESSQPSSSPPSQPQEQPEAKAREVEPEPEPEPMEVTDEEKERKERKSSAQKEKEAGNAAYKKKDFETAIQHYTKAMELDDEDISYLTNRAAVYIEMGKYDECVKDCDKAVERGRELRADFKMISRALTRKGTALAKLAKTSKDYDIAIETFQKALTEHRNPDTLKKLNEAERAKKELEQQEYYDPKLADEEREKGNQLFKEQKYPDAVKHYTEAIGRNPKDPKVYSNRAACYTKLGAMPEGLKDAEKCIELDPTFSKGYTRKGAIQFFMKEYDKAMETYQAGLKHGPNNPELLDGVKRCIEQINKANRGDLTQEEIQERQNKAMQDPEIQNILTDPIMRQVLVDLQENPRASQEHLKNPGVMQKIQKLVSAGIVQMR

SEQ ID NO: 55323 - protein, 36 aa, Oryza sativa
MELTNRSPVVASGTGSVPSTDSAVGCGSSSGSEGNN

SEQ ID NO: 55324 - protein, 805 aa, Oryza sativa
MMLKERIKQWHRVNLEVLHCHPFFWLREQEEQEGCTAETLSETQSLDTPLRHNAPSFSDIKDSDDEIPLNTTPNSKAAATELFDSEIFEWTQRPCSPELYSTPLKKQSKAKSKLDQIEEKGDEEDVHIGGSFDKLGNASNAAQLVNTKATKQKRKKTSPSNKNSAKLSNRAEPCIKKSDANQQGSNRRKSAALKSCQKSSSAVGRNTSGRRNKASSNSKPIHGSSDNSPESYLPKEGLDVEAPDKPLSERIQNLEKTSRRKGSARKLEMAGKTISDTTEKNSEPRSKRVRRMSDHAIAKPVEVPSGSGNETEIPQLHTLTKGSIQRKSSNARRHSKVCGEQEGKNKLENTTMTPIILHGKCQNKEAVCTAPSVRTASVKYKQAKFSEQPDCFGTENFGNLQACPARNVLLKKCEVSTLKVSCAFCQTDVITEESGEMVHYQNGKQVPAEFNGGANVVHSHKNCLEWAPDVYFEDDSAFNLTTELARSRRIKCACCGIKGAALGCFEMSCRRSFHFTCAKLIPECRWDNENFVMLCPLHRSTKLPNENSEQQKQPKRKTTLKGSSQIGSNQDCGNNWKWPSGSPQKWVLCCSSLSSSEKELVSEFAKLAGVPISATWSPNVTHVIASTDLSGACKRTLKFLMAILNGRWIVSIDWVKTCMECMEPIDEHKFEVATDVHGITDGPRLGRCRVIDRQPKLFDSMRFYLHGDYTKSYRGYLQDLVVAAGGIVLQRKPVSRDQQKLLDDSSDLLIVYSFENQDRAKSKAETKAADRRQADAQALACASGGRVVSSAWVIDSIAACNLQPL

SEQ ID NO: 55325 - protein, 110 aa, Oryza sativa
MEYRFPIVSGTGPTRLLLDRSRDVSNFSFPSDSGMFPSSLLPPSFTVSNDERFPSQVGMLPSILFFPSSKNSREDKRCIGGMLPTRLLEKTLRNCSAERFPIEAGIGPES

SEQ ID NO: 55326 - protein, 433 aa, Oryza sativa
MEPSDLVDGYKFGDQTTSDVRVCFKRADDQAEWFCCHSSVLSGNSKYFADWLSRNDIGSNNCIGVDCISADYEHYVKVLKLIYLPAESIIDSFESVRSAVGVLRASTLLKCELITRSCIEYLEAASWDEKEEEEILEVAQSLGSEEAVALLARLQAPNVSAVKNVFISAIRFATSMESPSPPFLDDLKTSAQEQIDFMLHEDDDTALVTMDEDVRSVVREGLKKLFSTLKIGLDLLTSEYEQLPEQAEQRVLCSLADIDWMANVLTKIEMMNEFVSGWSEISGYVLSVVQDKKYSSGLWLVKAKLIEVTGKAFDAVGYGSVVFPASSRVHFLRMWLPFMQTTKRLLDEKSKDDAIPQMDADLFQNIEGAIVSLVLALPSGDQADILGEWMKNAEQFRYPDLTEAFEVWCYRSKTAKRRLVGGLNGSGNPTVSL

SEQ ID NO: 55327 - protein, 321 aa, Oryza sativa
MAAAAARQTVCVTGAGGFMASSHVELLLSRGNYAVRGTVRDPGDAKNDHLRALQGAEERLQLLKADLLDYDSVASAVAGCEGVFHVASPVPSGRSTNPEVEVIAPAVTGTLNVLKACHEAKVKRVVMVSSIAAVFSNPNWPKDKAFTEDSWSDEELCRKNQDWYYLSKTVAEREAFAYAAKTGLDIVTICPSLVIGPLMQSTVNASSKVLINYFKGDRDTVENRLRNVVDVRDVANALLLAYENPASGRYICSSAPIRVSDMINILKTLYPTYTYPKNFVDVEENTIYSFEKLQKLGWSFRPIEETLRDSVESYKAFGILD

SEQ ID NO: 55328 - protein, 78 aa, Oryza sativa
MAAGGGCACTAGSTRAAADLTTTTTTAVTTTTTKLPAVLGDRGGRWAAPQHRGSGGGSTALPSPYCVFLCVLVCKDVY

SEQ ID NO: 55329 - protein, 133 aa, Oryza sativa; identical to SEQ ID NO: 37823

SEQ ID NO: 55330 - protein, 127 aa, Oryza sativa
MAASALLSPVRPLAGTTLSFGVPYQNKRRIPTMRVYCAADEEEEVNDLGVNVALSMLKFYKREISPLLPSSCRYVPTCSQYSMQAYKKYGVAKGTILTAWRLCHCNPLGGHGYDPPRWFGEEELPKQ

SEQ ID NO: 55331 - protein, 367 aa, Oryza sativa
MSSTAPLLTPYKMGRFDLSHRVVLAPLTRQRSYGNVPQPHAILYYQQRTTKGGLLIAEATGISDTAQGYKDTPGIWTKEQVEAWKPIVDGVHAKGGIFFCQIWHVGRVSNNTFQPNGQAPISSTNKSLKPAVRANGIDVATFSTPRRLETDEIPFVVNDYRVAARNAIEAGFDGVEIHGAHGYLIDQFLKDQVNDRSDKYGGSLENRCRFALEVVQAVTDEIGADKVGIRLSPFASYSEAADSNPEALGLYMANALNKFGILYCHMVEPRMVKLGEKFETPHSLRPIRDAFKGTFIAAGGYNKEDGNKAVSTGYTDLVAYGRLFLSNPDLPERFEIDAPLNKYNRETFYISDPVIGYTDYPFLPSDV

SEQ ID NO: 55332 - protein, 534 aa, Oryza sativa
MVSQSKTPAPEPSTTKMPSAPPAVKGVAKTLAQHHKAVIGFLLGFFLVLLLYTFLSGQLVSSEDAIVRAVTQQSTPAVHTDQDGRTTSPTSPTSTSSNTTQDNLEGKNTERSSQPAVNDEASDKMEEDLIRQDIDQAGTKNGTNHKPGAPRKPICDLLDPRYDICEISGDARTMGTNRTILYVPPVGERGLADDSHEWSIRDQSRKYLEYINKVTVRSLDAQAAPGCTSRHAVPAVVFAMNGLTSNPWHDFSDVLIPLFITTRVYEGEVQFLVSDLQPWFVDKYRLILTNLSRYDIVDFNQDSDVRCYPKITVGLRSHRDLGIDPARTQRNYTMLDFRLYIREVYSLPPAGVDIPFKESSMQRRPRAMLINRGRTRKFVNFQEIAAAVVAAGFEVVPVEPRRDLSIEEFSRVVDSCDVLMGAHGAGLTNFFFLRTNAVMLQVVPWGHMEHPSMVFYGGPAREMRLRDVEYSIAAEESTLYDKYGKDHPAIRDPESIHKQGWQFGMKYYWIEQDIKLNVTRFAPTLQQVLQMLRG

SEQ ID NO: 55333 - protein, 186 aa, Oryza sativa; identical to SEQ ID NO: 52979

SEQ ID NO: 55334 - protein, 173 aa, Oryza sativa
MRCWRRLAAAGALLAALCAALALAVAEHRRPDTTASSSSRRPLRFASGGGFKVALFADLHYGENAWTDWGPRQDAGSDRVMAAVLDAEKPDFVVYLGDLVTANNLGIPNASLYWDRAISPTRGRGIPWATVFGNHDDMPFEWPPEWFSPAGVPPLHCPPPSMSDSGKLKIVHF

SEQ ID NO: 55335 - protein, 340 aa, Oryza sativa
MADVGMVVVTPAASFHHTHHHHHHHEAAAAAAAAAAAAADPIFPLLSAGPCVLDPDKSAASGSAIQFWQPPPQLPSSAAGGNPNPSSSAFPYLKKPLPMLDTGGGSSGSGGAATCQDCGNQAKKDCGHQRCRTCCKSRGFDCSTHVKSTWVPAARRRERQQLTGSASSSPATASAAAASKKPRLLTSQTTTSHTSTSNATTPRSFDTTSSHQDASFRESLPRQVRAPAVFRCVRVTSIDDGEDEYAYQATVTINGHVFKGFLYDQGVDDGRGLAATSNDDSTAGGVPNISELHLGGASISGNAMREGGSSMVHSDLYGGGGGSGGGPHILGGSSYGNTMN

SEQ ID NO: 55336 - protein, 392 aa, Oryza sativa; identical to SEQ ID NO: 45636

SEQ ID NO: 55337 - protein, 453 aa, Oryza sativa
MALNYSSCSLTSSFLMNEDCAGMMCGCGCWSEEASPLSSGGVNSLWWDELEFELELEEEEEFDPVDLLPTDPFGMNLETTFTAAIASCIEDLTVMSSAGRFGDSRDDAVFADLSYYLNKAFVLSPEFQFGGYRGVFEGPLGFGGLSAGEGDSFGFMKNPSSSGNADDSFGFVETPPTSGNAALECGDAVEVVPVQEGGVPHEGMLFALDYLGLRDILSVERVCKTLHSAVRNEPLLWKSIHIEGDLRQRISDAGLLHLTQKCPDTLQCLSIACCVNITDQGLKAVLESNPRLTKLSILGCPRSTLDGLISNLKSFNTKAVFGIKHLRVGTLFSLRKEQYEELLSLLNTDKTQEVHNRGPRFLHANRFLSDCNDGYALDIEMCPICQNYKLVYDCPDEGCDDRRSGNCKGCTVCILRCYECGRCVDKLAFKESFSLDWVCPNCQEKKDLSPPMK

SEQ ID NO: 55338 - protein, 716 aa, Oryza sativa
MASPRNEGFLTQDQREKLRIAVQNAETLSLASPRSPTGGSTSALLQQYEQQRAAAAAAAARGGGGGGGGGGVRHVRRSHSGKTIKVKKDGAGGKGTWGKLIDTDTDACLDRNDPNYDSDEEPYELVEAPVSTPVEDYKKSVAPIIEEYFSTGDVKLAASDLKELGYDDFHRYFVKKLVSMAMDRHDKEKEMASVLLSSLYGDVISSTQIRLGFVMLLEAVDDLAVDILDAVDVLALFIARAVVDDILPPAFLSREKASLSESSKGMQVVQIAEKSYLSAPHHAELLERRWGGSTRTTVDAVKLRITDLLKEYIKNGDTAEACRCIRELAVPFFHHEVVKRALTLGMESPTAEALIVKLLKEASEELLISSSQMMKGFSRVVDSLDDLSLDIPSAKSQFQTLVSKAVSEGWLDSSFVHVGANGDVQDDEHEKLRRYKKEAVSMIHEYFLSDDVPEIIRSLKELGSPEYNPVFIKKLITIAMDRKNREKEMASILLSSLSMELFSTEDIVKGFIMLLESAEDTALDILDASDELGLFLARAVIDDVLAPLNLDEISGKLPPNCSGAETLNMARSLATAHHAGERLLRCWGGGTGWVVEDTKDKIAKLLEEYESGGDVGEACNCIRELHMPFFNHEVVKKALVMAMEKKNDRILGLLQECFGEGIITINQMTKGFSRVRDGLDDLALDIPDAREKFLSYVEHAKKSGWLLPSFGVATSA

SEQ ID NO: 55339 - protein, 253 aa, Oryza sativa; identical to SEQ ID NO: 29251

SEQ ID NO: 55340 - protein, 531 aa, Oryza sativa
MAPAMALRLLVVVAVAAVVSCAVAADEGSVVEVWPMPATASKGGQTLHVSRELRMTAEGSKYADGEAILKDAFQRMVTLIELDHVINGSSQGLPLLAGVNVVVHLPGDELNFGVDESYNLSVPATGSPIYAQIEAQTVFGALHALETFSQLCNFDFTSRLIELQSAPWSITDMPRFPYRGLLIDTSRHYLPVPVIKSVIDSMTYSKLNVLHWHIVDEQSFPIEIPSYPKLWNGAYSYSERYTMDDAIDIVQYAERRGVNVLAEIDVPGHALSWGVGYPSLWPSATCKEPLDVSSESTFQVINGILSDFSKVFKFKFVHLGGDEVNTSCWTSTPRVKAWLAQHGMKESDAYRYFVLRAQKIAKSHGYEVINWEETFNNFGDKLDRRTVVHNWLGGGVAEKVVAAGLRCIVSNQDKWYLDHLEVTWDGFYMNEPLRNIKNPAQQKLVLGGEVCMWAEHIDASDIQQTIWPRAAAAAERLWTPFEKLSKEWEIAALSARLARFRCLLNHRGIAAGPVTGYGRSAPAEPSSCIKQ

SEQ ID NO: 55341 - protein, 81 aa, Oryza sativa
MYWWNSTHSCVNSWCGEHLQTIWFLRMHESVMNLSEPCVRASKMLGISDLFQTLAKSLVSVWYCRNEIAISRKHLLGLKSL

SEQ ID NO: 55342 - protein, 441 aa, Oryza sativa
MGASGKWIRTLVGLRPAAEREKERGGGGGKGRKWSRLWRSSSSQRGGGNASASEVYSETSSSADALSSVVAAVVRAPPRDFRLIRQEWAAVRIQTAFRAFLARRALRALRGIVRLQALVRGRRVRKQLAVTLKCMQALVRVQARARDRRARISADGLDSQDMLDERGGRVDHVKEAEAGWCGSQGTADDVRSKIHMRHEGAIKRERARTYAQSHQRCSNHGGRPSSPAVSLKHHGNGATRSNHSWSYLEGWVATKPWESRLMEQTHTENSTNSRCSESVEEVSVGGPKLSDASSVKIRRNNVTTRVAAKPPSMISATSSDFVCDESSPSTSSVTPLSANNSLATERRSDCGQVGGPSYMSLTKSAKARLSGYGSHKPPLQRQRSGDLLHHNNRMAFSSIDVQSTAGSEVSVTSKRLNSLALKGRATRSLDKENERRPSSLL

SEQ ID NO: 55343 - protein, 379 aa, Oryza sativa
MAPTTTATAAAEQAPPPQHTRKAVGLAAHDDSGHLTPIRISRRKTGDDDVAIKVLYCGICHSDLHTIKNEWRNAVYPVVAGHEITGVVTEVGKNVARFKAGDEVGVGCMVNTCGGCESCRDGCENYCSGGVVFTYNSVDRDGTRTYGGYSDAVVVSQRFVVRFPSSAGGGAGAALPLDSGAPLLCAGVTVYAPMRQHGLCEAGKHVGVVGLGGLGHVAVKFARAFGMRVTVISTSPVKRQEALERLGADGFIVSTNASEMKAAMGTMHGIINTASASTSMHSYLALLKPKGKMILVGLPEKPLQIPTFALVGGGKILAGSCMGSISETQEMIDFAAEHGVAADIELIGADEVNTAMERLAKGDVRYRFVVDIGNTLRSD

SEQ ID NO: 55344 - protein, 560 aa, Oryza sativa
MSPPVAGAASSGDGPPGRPPRELYTIPASSGWFQWDEIHETERRALPEFFGGAGGSGFGTASRNPRIYREYRDYIISRYREDTSRRLTFTEVRKALVGDVTLLRKLFAFLDSSGLINFSASPSRPEAQQQQRQTEAEAVVEAPVGLQVTPRPPPSYFAEEKGGGGNENGFRLPPLTSYSDVFGEWAPGMAPICGLCGMECRDGNAQILKDGFKVCSKCYANNDNKGEANIHPGDKKERIDNHSSSAWTDAETLLLLEGVLKHGDDWDLIAQHVRTKNKSECIARLIQLPFGEHMLGTVNGKLDNRLHKIQTTDGKVNKSTVKESSSQPTETVDDMQIDGNEDGADKSVEEHPTKHRRLFSSIDITVSLMEQLAHLTTSTSPDVVAAAADAAIKALGNENPQARRAFQLSEKEYQTRAFSSNHARQSDDVGGGDRDVEMHGHPDKKQGKMFISTTYQVRAAVATSIGVAAARAKMLADQEEREMELLMASIIETQLKKIQYKIKHFEELELIMDQEYATLQQMKSSLVDEWQKVLKRAFETGVPISRDEVLIKLFQNKPNL

SEQ ID NO: 55345 - protein, 136 aa, Oryza sativa
MAATARSIDHASNPKTDAVARHTTDAVACRLLRGSSHSLEVARLWHHRSPPHILFAAPSSPSITRSEKTSIRSMYRCLQVFNGTNDYPTRRPVDYPLEEQQTDEHRLEDQGDIHVHKHWTKWRQDSKESREQAMKE

SEQ ID NO: 55346 - protein, 913 aa, Oryza sativa
MMSRSYTNLLDLAEGNFAALGPGGGGGGRRRSGSFGLKRMSRVMTVPGTLSELDGEDDSEHAATNSVASDVPSSVAGDRVIVVSNQLPVVARRRPDGRGWSFSWDDDSLLLQLRDGIPDEMEVFFVGSLRAEIPVADQEEVSQALLDRFRCAPVFLPDPLNERFYHRFCKRHLWPLFHYMLPFSSSASPSPSSSSSSSSSPSSSSGSGHFDSGAWEAYVLANKFFFEKVVEVINPEDDYVWVHDYHLMALPTFLRRRFNRLRIGFFLRSPFPSSEIYRTLPVREEILKALLNCDLIGFHTFDYARHFLSCCSRMLGIEYQSKRGYIGLDYFGRTVGIKIMPVGVHMGQLKTVLSLPDREWRVSELQQQFEGKTVLLGVDDMDIFKGINLKLLAFENMLRTHPKWQGRAVLVQIANPARGKGKDLEAIQAEIHESCKRINGEFGQSGYSPVVFIDRDVSSVEKIAYYAIAECVVVTAVRDGMNLTPYEYIVCRQGSDSTSEVNGPKRSMLVVSEFIGCSPSLSGAIRVNPWNIEATAEALNEAISMSEQEKHLRHEKHYRYVSTHDVAYWSKSFIQDLERACKDHFRRTCWGIGLGFGFRVVALDPHFTKLNMDSIVMAYERSESRAIFLDYDGTLVPQTSISRTPSAEVLRIINTLCSDRRNKVFLVSGRRRDKLGEWFSSCPDLGIAAEHGYFLRWTRDEEWQTCTQTSDFGWMEMAKPVMNLYTEATDGSYIDPKESALVWHHQDADRGFGSSQAKELLDHLESVLANEPVSVKSGQFIVEVKPQGVSKGVVAEKILVSMKERGKQADFVLCIGDDRSDEDMFENIADTIKKGMVATNTSLFACTVGQKPSKAKFYLDDTFEVVTMLSALADATEPEPETDLTDEFDELAVSVSSVDIDDEQTPSDKLIGG

SEQ ID NO: 55347 - protein, 778 aa, Oryza sativa
MGWAWRREQWAVAWLSVAVLGAALVGAAGAFEEGTAVYIVTMKQAPVFHKRLDLERFGSSRVAGGGGGGGGDTPSTSILMKPRHGPAQPMNYGSYLVRLQNSLLKRTLRGERYIKLYSYRYLINGFAVVITPQQAERLSMTKEVANVMLDFSVRTATTHTPEFLGLPQGAWVQEGGPQCAGQGVVVGLIDTGIDPTHPSFADDLITDSYPVPAHYSGICEVTNDFPSGSCNRKLVGARHFAASAITRGVFNASQDHASPSDSDGHGTHTASIAAGNHGIPVVVAGHHFGNASGMAPRAHIAVYKALYKSFGGFAADVVAAIDQAAEDNVDIISLSITPNRRPPGLATFFNPIDMALLSAVKAGIFVVQAAGNTGPSPKSMSSYSPWIFTVGASAHDREYNNYVVLGNNLTITGVGLAPGTDGDSMFTLVAAPHALKNNVASPTEMSLGECQDSSHLDEDLIRGKILVCSYSIRFVLGLSSVKQALDTAKNVSAAGVIFYLDPFVIGFQLNPTPMDMPGLIIPSSDDSKVFLNYYNESLVRDETSNKIVSFGAIAKILGGQNPNYGISAPKVMFYSARGPDPEDNSLANADILKPNLIAPGSSIWGAWSSLGLDSAEFAGESFAIISGTSMAAPHVAGLAALVKQKFPYFSPAAIGSALSTTTSLSDREGNPIMAQRTYGNPNSTQSPATPFDMGNGFVNATAALDPGLIFDSSYDDFFSFLCGFGISTPEHVKQIAGWGADGVIIGSAMVRQLGEAASPEEGLKKLEELAKSLKAALP

SEQ ID NO: 55348 - protein, 436 aa, Oryza sativa
MHLLLGLVMYWVAEEMTVPVLVDVTTRALCPGADIACPEAIYLTGLHQTVGGIFRAVGYTLMGQLADEYGRKPLLLLTASTSIIPYGVLACNKSKIAVYIFLILRTLSFMIGQGTITSLAVTYTADVVDPSKRAFAFGCITGILSASHALGNGFSRFLPERWIFQVSVALLISSVIYMKISLVETLQRASSGSFEHMSFSSLVVRLPLRRWESIKENINIIRRSETLSRITYISFFYELGMIGISDVLMYYLKSVFGFDKNQFSEILMVVGIGSIFSQILVLPVIINTVGEKGVLCVGILASVAYAVLYGLAWSYWVPYLTSSLGVIYVLVKPATYAIISGEVDSSDQGKAQGFISTVKSTAVLLAPLFMSPLTSYFISEQAPFNCKGFSFLVAGFFLAISLGISFMLKPEAKCTRVAVPDQLDHEAVQAPLLAQP

SEQ ID NO: 55349 - protein, 107 aa, Oryza sativa; identical to SEQ ID NO: 37661

SEQ ID NO: 55350 - protein, 435 aa, Oryza sativa
MAAAKHFTYVILGGGVAAGYAAREFAKQGVKPGELAIISKESVAPYERPALSKGYLFPQNAARLPGFHTCVGSGGERLLPEWYSEKGIELILSTEIVKADLASKTLTSSADATFTYDTLLIATGSSVIKLTDFGVQGAEANDILYLRDIEDADKLVAAMQAKKDGKAVIVGGGYIGLELSAALKTNNFDVTMVYPEPWCMPRLFTSGLAAFYEGYYANKGIHIIKGTVAVGFDADANGDVTAVKLKNGNVLEADIVIVGVGGRPLTHLFKGQVAEEKGGIKTDAFFETSVPGVYAIADVAAFPMKLYNEIRRVEHVDHARKSAEQAVKAIKAKEAGESVPEYDYLPYFYSRSFDLSWQFYGDNVGEDVLFGDNDPTAAKPKFGSYWIKDGKVVGVFLEGGSAEENQVIAKVARAQPPVADVEALKKEGLDFAAKV

SEQ ID NO: 55351 - protein, 600 aa, Oryza sativa
MSSPPPAAAASPSSELTKSKKKKIKSKDAATAAAVDPPSLAEAEAKTDGYLIKPQSLVPSLDTSTWPLLLKNYDRLNVRTGHYTPLPSGHSPLKRPIAEYLRYGVINLDKPSNPSSHEVVAWIKRLLRVDKTGHSGTLDPKVTGNLIVCVDRATRLVKSQQGAGKEYVCVARFHAAVPDTARVARALEALTGAVFQRPPLISAVKRQLRVRTIYESKLLEHDADRHLAVFWISCEAGTYVRTLCVHLGLLLGVGAHMQELRRVRSGILGEQDNMVTMHDVMDARWAMDNYNDETYLRRIVMPLEVLLTSYKRLVVKDSAVNAICYGAKLMIPGLLRFENDIDVGEEVVLMTTKGEAIAIGIAEMTTAVMATCDHGAVAKIKRVVMDRDTYPRKWGLGPVALKKKKMVAEGLLDKHGKPNEKTPAEWIRNVALPTGGDAMIASIAAAPEEAKVKAEQDVVATEEVKEKKKKKKHKDEEDAADEGRKRKIEDDDASASVPVKKIKVEESAEEVEGEKSEKKKKKKKDKGEQGSGDAEVKEEKADISDGEKVGSEKKKKKKKSKEGGDVVDPESAANGDGVEAEKSEKKKEKKKKKSRDTEEA

SEQ ID NO: 55352 - protein, 590 aa, Oryza sativa
MEDLLGAEVGKNDYDWLLTPPGTPRCPVLEVAEKTPSPNILPKRTATRSSSTTRASRLSVSQTENGHSTAPTRPARSNSVTRPSIQSTLMSSSNRTAVLNTSISSVSSRPTTPSRRSSTVVAPKQSIAASRPVPARSSTPVKTRPSTPTKTRPSTPVRTRQTANSTSDSAAARTTSAQNSRPSTPTSRSRAMPNSSSGAIPAMSRPGASTISATSRSNASTISATSRPGSSSSNVPGISRATSLSSSTVPSMSRSSSRSSTPTRQPAMRSSAPAVGRSPSVGRSSSISSLTSSINRPAANGGRNSAPSSAPSSRPSSPGPRPRAPVRPLDIPDFPNETPPNLRTKLPERPLSAGRSRPGMALGVRSTSNTEPSAASAPVKKVSVPAMSRSKFSDAPSRTPTLTNGRQNRQSERSTVDSQPSKVSRPATGTDNGFGMTMSKKSLDMAIRHMDIRQNLGGIRGASLFPHSIRSTAGKGRPARMSDPGHTISNGDHRHYADNGSTNGHFSGDSNGALSRNGGSSTDSPDRGSIGGKETLSELDMYGSSRYEAMLLREDVRNTSWLHGFDDSKPDQSPLFDHRFEPLPEPFSPL

SEQ ID NO: 55353 - protein, 455 aa, Oryza sativa; identical to SEQ ID NO: 34762

SEQ ID NO: 55354 - protein, 89 aa, Oryza sativa
MMQSNIRRERPKRPDPPCTICRGTGKIDCRNCFGRGRTNHADLVMLPKGEWPQWCRICGGSGLDYCHRCHGTGEFREPMGFHFATIHRK

SEQ ID NO: 55355 - protein, 67 aa, Oryza sativa
MGRRQDGVLGSERWRGGQGVPGQRRGRCAHDDANAASGGEDGATDAVRSEPWCWALARYVLPLPLNI

SEQ ID NO: 55356 - protein, 366 aa, Oryza sativa; identical to SEQ ID NO: 51219

SEQ ID NO: 55357 - protein, 250 aa, Oryza sativa; identical to SEQ ID NO: 30432

SEQ ID NO: 55358 - protein, 585 aa, Oryza sativa
MASTLEPRARLPATTSANSSVPRTTGSSNAQPSSETKPASSSSDAKLEQHEKSLNLEPRTRLSATTSANSSVPWTTGSSNAQPLSETKTASSSSDAKPEQQEKPRDHQPSQEVSTKQDDKAENDTKATATSGPLEFSFHPDEQTLRLQRACSSPVPFPSNKNMLVADAAARSSSLKVAGEGPKPKPKQRARSPPLRRDVPELFKEAKSSSKRFSTPPPRRKPSSPPAPSRSPPHVFATARAHGKPKHKKDSSANGRAKVAALEVLEKWTVDRSQLLIGHRFASGAHSRLFHGIYKEQPVAVKFIRQPEDEEDAELAAQLEKQFNTEVTTLSRLNHPNVIKLIGACSSPPVFCVITEFLSGGSLRTFLHKQEHKSLPLEKIISIGLDIANGIGYIHSQGVVHRDVKPENIIFDSEFCAKIVDFGISCEEAECDPLANDTGTFRWMAPEMMKHKPYGRKVDVYSFGLILWEMFTGSVPYEDLNPFQAAFAVFDKNERPVIPSSCPAPLRLLIEQCWASQPDKRPEFWQIVQILDKFKAVLDKDGTLDNMPCLNLQGTHDHKNWLAHWVQKLKHTHHDLSGPPPPKLM

SEQ ID NO: 55359 - protein, 475 aa, Oryza sativa
MDAAAMESLILELHAIEAVKFGAFVLKSGITSPIYLDLRMLVAHPRLLSTVASLLGSLPATRPYDLLCGVPYTALPIASVLSAAASVPMLLRRYHVTPHAAAECLDGSFRAGDAVLIVEDLVTTGSSVLETVAPLREVGLVVADAVVVIDREQGGRENLAANGVALHSLMTLTEVLAVLVKRGKLGEEKAQEVKRFLDANRKMAVPGLPVKPKVVRKAFSERAGLATNPMGRKLFELMEAKQSNLCVAADVGTATELLDLADKIGPEICMLKTHVDILSDFTPDFGHKLRSIAERHSFLIFEDRKFADIGNTVTMQYEGGIFRILDWADIVNAHIVSGPGIVEGLKLKGLPKGRGLLLLSEMSSAGNLAHGDYTAAAVKIAEQHSDIVIGFISVNPASWSVTPSSPAFIHATPGVQLVAGGDSLGQQYNTPYSVINDRGSDIIIVGRGIIRANNPAETAREYRIQGWHAYQSSLS

SEQ ID NO: 55360 - protein, 459 aa, Oryza sativa
MTTRVNSVVEKCCKDDHAVVCEVTALSMDAAVALSEKIFNVHTAPSDKKSCSSIAKLSGRMPLAIICISAAVAQLLSPPSATNRFDVALCQALKGFAEIPCMKPLVESLVLGYHCLPPHLKTCLLECSIYTPNQRFERDDLIRIWMDEGFADEEQAPGYFEELVKWGYISISPAEGRRHSRVAEYEISAVVLAFLRFQAEEHGFVASAGYFSNIESLCGRRHSRISVQGGLGSWVVSRLDFSCMRTLVVFGRASLIPFDRLSHLRVLHLDEEDTSLEGAADLYNFPDLGDDDLVDICELLLLRYVKLKGCKITMLPPQIGQLKLLETLDVRGTGVRELPREIGELQRLKTLNVSNTAVTQVPKEIGKLHMLKTLDVSDTNVRELPAEIRELENLETLDVSNTMVAKLPREIRALQLLKTLHVSGIDVTETELAEEIGQLQHLETLDVSNTKVAKLPMEI

SEQ ID NO: 55361 - protein, 129 aa, Oryza sativa
MADVAADRPPAAEQEEARPPSSTAAVAEEDEEEEEGDVCRICRNPGDDEHPLRYPCACSGSIKFVHQDCLLQWLDHSNSRQCEVRNPRFAFMGRGGLGVCLDSAVESIDWMIIRCICSIISGEFLRCCM

SEQ ID NO: 55362 - protein, 370 aa, Oryza sativa
MSNPAAYYAAVARKQYFCYQCNRTVLLPASAAAAGALSCPECRGDFIEEVNVPAPAIIPFPFAFPPMMPTATSASAAAAAAASPTQSSSSSAATSPSSDLSAFLNSMLGPLNLRTDERMPGTTSAAGTATPEDEPDGFDAVTFFQNYLQNLMDGGANIQVLLDDASVGLAPGIGRVGGASFGDYFVGPGLEQLIEQLTENDPNRYGTPPAAKSALSTLPDVVVTDAMVAAADGAECAVCKEDFSPGEGAKQMPCKHIYHADCIMPWLDLHNSCPICRFELPTDDPDYEGRKKSNPQPTAGVDAGAASGSSTAAEEREESGESARLVERRFNVSLPWPFSGLGSQTPQQDGSNGGAGASGSKDGGASSDKK

SEQ ID NO: 55363 - protein, 312 aa, Oryza sativa
MEIPVIDLKGLAGGDEERERTMAQLHEACKDWGFFWVENHGVEAALMEEVKSFVYRHYDEHLEKKFYASDLAKNLHLNKDDGDVLVDGGDLADQADWEATYFIQHRPKNTAADFPDIPPAARESLDAYIAQAVSLAELLAGCISTNLGLAGAAGVVDAFAPPFVGTKFAMYPPCPRPDLVWGLRAHTDAGGIILLLQDDAVGGLEFHRGGREWVPVGPTRRGRLFVNIGDQVEVLSGGAYKSVVHRVAAGAEGRRLSVATFYNPGPDAVIAPATAAAPYPGPYRYGDYLDYYQGTKFGDKTARFQAVKKLFS

SEQ ID NO: 55364 - protein, 314 aa, Oryza sativa
MEAAAAMAALPASPCSSSSSPSSLFLAPNPCCWKAAPRATVRASASAARRTLSSAWELPGPSAARPAARKPRLEELDTTNMLLRQRIVFLGSPVDDMSADLIISQLLLLDAEDKTKDIKLFINSPGGSITAGMGVYDAMKFCKADISTVCFGLAASMGAFLLAAGTKGKRFCMPNARIMIHQPSGGAGGKVTEMGLQIREMMYEKIKINKILSRITGKPEEQIDEDTKFDYFMSPWEAKDYGIVDSVIDEGKPGLVAPLAGAVPPPKSRVWYLWNASGPTRKIMKNLPSEEKLIQNGNGSASGDDGKFKEISTA

SEQ ID NO: 55365 - protein, 491 aa, Oryza sativa
MGCFPCFGSGGKGGAKKGGGGRKDGGSADRRVARVGSDKSKSQGGLDSRKDAFIPRDANGQPIAAHTFTFRELAAATKNFRQDCLLGEGGFGRVYKGHLENGQAVAVKQLDRNGLQGNREFLVEVLMLSLLHHDNLVNLIGYCADGDQRLLVYEFMPLGSLEDHLHDIPPDKEPLDWNTRMKIAAGAAKGLEFLHDKANPPVIYRDFKSSNILLGEGYHPKLSDFGLAKLGPVGDKTHVSTRVMGTYGYCAPEYAMTGQLTVKSDVYSFGVVFLELITGRKVIDNTKPLGEQNLVAWARPLFKDRRKFPKMADPLLAGRFPMRGLYQALAVAAMCLQEQAATRPFIGDVVTALSYLASQTYDPNTPVQHSRSNASTPRARNRVGANFDQRRLHSPNHQQSPDLRKEGTTTSKYEAEVSRTNSGSGSGRRAGLDSMDVTGSQMGSPAHAGRKRESSRSTDRQRAVAEAKTWGENSRERKWPNARGSFDSTNE

SEQ ID NO: 55366 - protein, 329 aa, Oryza sativa
MECGGALQLPPGFRFHPTDDELVMYYLCRKCGGLPLAAPVIAEVDLYKFNPWDLPERAMGGEKEWYFFSPRDRKYPNGQRPNRAAGTGYWKATGADKPVGSPRAVAIKKALVFYAGKPPKGVKTNWIMHEYRLADVDRSAAARKLSKSSHNALRLDDWVLCRIYNKKGVIERYDTVDAGEDVKPAAAAAAAKGGRIGGGGGAAAMRVELSDYGFYDQEPESEMLCFDRSGSADRDSMPRLHTDSSGSEHVLSPSPSPDDFPGGGDHDYAESQPSGGCGGWPGVDWAAVGDDGFVIDSSLFELPSPAAFSRAAGDGAAFGDMFTYLQKPF

SEQ ID NO: 55367 - protein, 774 aa, Oryza sativa
MMQRPFRPEEYSLKETSPHLGGGAAGDKLTTTYDLVEQMQYLYVRVVKAKDLPSKDITGSCDPYVEVKLGNYKGTTRHFEKKTNPEWNQVFAFSKERIQSSVVEIIVKDKDFVKDDFIGRVLFDLNEVPKRVPPDSPLAPQWYRLEERNGHKVKGELMLAVWMGTQADEAFPEAWHSDAASIPGDGLASIRSKVYLTPKLWYLRVNVIEAQDLIPNDRTRFPDVYVKAMLGNQALRTRVSPSRTLNPMWNEDLMFVAAEPFEEHLILSVEDRIAPGKDDVLGRTIISLQHVPRRLDHKLLNSQWYNLETHVIVDGEQKKETKFSSRIHLRICLEGGYHVLDESTHYSSDLRPTAKQLWKHSIGILELGILTAQGLLPMKTKDGRGTTDAYCVAKYGQKWVRTRTIIDSFTPKWNEQYTWEVYDPCTVITIGVFDNCHLNGGEKANGARDTRIGKVRIRLSTLETDRVYTHAYPLIVLTPAGVKKMGEVQLAVRFTCSSLLNMMHLYSQPLLPKMHYVHPLSVMQVDNLRRQATNIVSTRLSRAEPPLRKEIVEYMLDVDSHMWSMRKSKANFFRIMGVLSPLIAVAKWFDQICHWRNPLTTILIHILFVILVLYPELILPTIFLYLFLIGVWYYRWRPRQPPHMDTRLSHAESAHPDELDEEFDTFPTSRPPDIVRMRYDRLRSVAGRIQTVVGDLATQGERLQSLLSWRDPRATALFVTFCFVAAIVLYVTPFRVVVFLAGLYTLRHPRFRHKMPSVPLNFFRRLPARTDSML

SEQ ID NO: 55368 - protein, 467 aa, Oryza sativa
MAAATAAPSIDEAKAKSVLRQVEFYFSDSNLPRDKFLRETVEQREDGLVSLALICSFARMKSHLGLDAAVKPETVPEETVLAVAEVLRRSQMLRISEDGKMVGRASELLKADEIIKQVDSRTVAASPLPYNVKLEDVQSFFAQYAKVNSVRLPRHISNKKHFCGTALVEFSEEDEAKIVLENNLFFAGANLEIKLKKEFDAETESKKEAYEKAHPKKDEQNEGYPKGLIVAFKLKRITVDGGVQQNCADNDTATEEETPKSMKKTSTGESEERTTVNSDMEEQKSSDDMTEAKEVNAGEATESGDKCTVDALLESEKKGDNETSIKDDRGLSGKANSPISREDLKEAFKKFGTVRYVDFSIGDESGYLRFEDSKAAEKARMSAVLADEGGLIVKDHIVTLEPVTGEAEKDYWNTIRGIQGKYKDNRSYKGRTGKSYRGGKQFNGKRGRHSDSSEKGANKTQKVEAAA

SEQ ID NO: 55369 - protein, 812 aa, Oryza sativa
MRKWALSSALLLLLLLLTTLPDPAKKLQVNADDSTDELVDPPKVEEKIGGVPHGLSTDSEVVQREAESISRKTLRSSAEKFEFQAEVSRLMDIIINSLYSNKDIFLRELISNASDALDKIRFLALTDKEVLGEGDTAKLEIQIKLDKEKKILSIRDRGIGMTKEDLIKNLGTIAKSGTSAFVEKMQTGGDLNLIGQFGVGFYSVYLVADYVEVISKHNDDKQHVWESKADGSFAISEDTWNEPLGRGTEIRLHLRDEAKEYVEEDKLKYLVKKYSEFINFPIYLWATKEVDVEVPADEDESSESSEEEESSPESTEEEETEESEEKKPKTKTVKETTTEWELLNDVKAIWLRSPKEVTEEEYTKFYHSLAKDFGDDKPLSWSHFTAEGDVEFKALLFVPPKAPHDLYESYYNSNKSNLKLYVRRVFISDEFDELLPKYLSFLKGLVDSDTLPLNVSREMLQQHSSLKTIKKKLIRKALDMIRKLAEEDPDEYSNKDKTDEEKSAMEEKKGQYAKFWNEFGKSVKLGIIEDATNRNRLAKLLRFESTKSEGKLASLDEYISRMKPGQKDIFYITGSSKEQLEKSPFLERLTKKNYEVIYFTDPVDEYLMQYLMDYEDKKFQNVSKEGLKLGKDSKLKDLKESFKELTDWWKKALDTESVDSVKISNRLSDTPCVVVTSKYGWSANMEKIMQSQTLSDASKQAYMRGKRVLEINPRHPIIKELRDKVAQDSESESLKQTAKLVYQTALMESGFNLPDPKDFASSIYRSVQKSLDLSPDAAVEEEEEVEEAEVEEKESSNIKEEAEPSSYDKDEL

SEQ ID NO: 55370 - protein, 777 aa, Oryza sativa
MVACFRYASIKVHSVYLPPPKLDFTSQHQEWVEQEANEVVDSAELLFTEVLNALHQISEGRPITGSFDGNMKILELRRNIMELEEILQIEKADFTESLKNLLNKEIRKGKPFIDILEVNKLRRQLLFLCYLWDQRLIFIANSGGKYCDTLGGLRVGSRSSDSNDKSVDTNATTKLEKSSKGSEVLSNAKEGSLKQSQSPLHANDKEPNQPDQSNGNSSRIGAGLNGMEDAIAKINHSNSADVKDNLDHQESSIGVRRVLSDGQFPVNADISDTLDAKWRGENGTVPDTSILKPLALLEGSADLKNQAKAVPTNASLSVRSGDTVEDLSSWLKMPYMTFYDSLNTNSGTAPRFGALADYNPVYITLFRELSQQGGARLFLPTGANDVVIPVFDDEPTSIISYALVSPMYCHQMLDENSKNKDGPDSSLPLPVYDSGNFNPFHLFEDFGSADDLASSISGTRGSFVPDLVHLRVPFEDGGPLGKVKYTVTCYYAKSFEALRRSCCPSELDFLRSISRCKKWGAQGGKSNVFFAKSLDDRFIIKQVTKTELESFLKFGLDYFKYLSESISTGSPTSLAKILGIYQVTIKHVKGGKESKMDLLVMENLLFGRNITRLYDLKGSSRSRYNADSSSNKVLLDQNLIEAMPTSPIFVGNKGKRLLERAVWNDTSFLAGIDVMDYSLLVGVDEEKHELVLGIIDFMRQYTWDKHLETWVKSSGILGGPKNAPPTVISPMQYKKRFRKAMSAYFIVIPEQWMPAIINPSKSSSNLCQEDPQNASQE

SEQ ID NO: 55371 - protein, 311 aa, Oryza sativa
MFSVLNFDGGNAYEQIIEATENFSEKYCIGAGGYASVYVAKLSNGKNFAVKKINATENGRLINEQMFYREIEATMQIRHKNIVKVFGYCCTARDKFIVYKYMKGGNLLTALKSYRSASELDWKRRLCIAQDVAHALSYLHHDCSDPIVHRDVTTKNILLDLEFRACLSDFGIAKILDADGSGHTRLAGTKGYLAPELAYTTKVTEKCDVYSFGVVVLELLMGSHPGDFVSSISCPSKKSTPMKDLLDTRLPPPAGEVASEIFGLITVAIQCLHPNPSTRPTMPSAIHLFSKFSRAVDLDYLHADIMEFCLL

SEQ ID NO: 55372 - protein, 477 aa, Oryza sativa
MAAARRVVLFPSLGVGHLAPMLELAAVCIRHGLAVTVAVPDPATTAPAFSAALRKYASRLPSLSVHPLPPPPHPPASSGADAAAHPLLRMLAVLRAHAPALGDLLRGPHAARALVADMFSVYALDVAAELGVPGYLLFCTGATNLAVFLRLPRFCAGSSGSLRELGDAPVSFPGVRPLPASHLPEEVLDRGTDISAAMLDAFDRMADARGILVNTFDALEGPGVAALRDGRCLSNRATPPVYCVGPLITDGGAEEERHPCLAWLDAQPERSVVFLCFGSRGALSPEQVSEMATGLERSEQRFLWALRAPAGTKPDAAMSLLPDGFLARTADRGVVVTASWVPQVAVLQHASTGAFVTHCGWNSTLEAVAAGVPMVCWPLDAEQWMNKVFIVEEMKIGIEVRGYKPGALVQADIVDAILRRIMESDAQQGVLERVMAMKESAAAAWKEGGSSCTAFAEFLKDMEEGNVAMAHSNQVET

SEQ ID NO: 55373 - protein, 78 aa, Oryza sativa
MSQKHWHSIFQFWNSSQNMMLLWKFFLETWGLLWEGRRTSFVCRDGFLLKHATTLLLPRYIKRSLNLVLMTGSPFSII

SEQ ID NO: 55374 - protein, 257 aa, Oryza sativa
MSSTQSFKSGATRSFTTTMRRGANGAPLCFSGSREGKRRALSLPNGSQGRSLRLRLCCAPPESKWWTTPLTPDDLIEPTGHGQEELEAIWNALVEEPLRPILTAFQEIKATNGNVFRCRCFHAGITSGLLVLVIRICQFHKLAPGLCVDFVLGYVCYRMSVLAAELKRNGKANNICARIQFVIMLLLFWANNPIKDSCFYFTQLIWYFALHVYSCAVFYEYIGVKHPARYLEAMFYTILTTNGGLMKVLKFMFLGQE

SEQ ID NO: 55375 - protein, 328 aa, Oryza sativa
MPSPLKRRIPGRLGRLLASLRPPSRAGPLPVQTGFPTSLADLLVKNHDRLLLTKPRRRRRPTPPTTTTATASVAAADVETPLPSGREELEEEKVGGVAVRLRPELLGVGAAAALALMVIWSRWLVAAVTVASLSLFWIESVRSSSSRLRPRPRSTPAAETAAELPDLRGRGVVSPIREAAAATPRPSSADSDVGSEVSVSSIWTDGDEMSQLVVGDSTTNPTKRKEKRRWLRKLIAKRKEKKDSSVVSPSHGEVVGNAAAEQQQQPSTSAEPIMAEASPADGRRGGALPVAAFVPVVLVGLVGGKLPAVALTVIFAVFFSSVERRSPA

SEQ ID NO: 55376 - protein, 651 aa, Oryza sativa
METAVLVFAGKSLATPAISFFVNKAFSYLNEYRKAEGLEAVKNRLEENIPKIQSVIDVADPDYIKDKSEALDAWLWQLRDAVEEAEDAIDELEVERDQNKVSHQAGSSSFTRMKHKFVQSVKHVRVLGTTSNSPLKRLKKALEGLDEAAKGVKNFLTLVQIHQNTISNLNNPEQDDISFRAKGKDLNADRVFGRENEKEHIVGWLTNTSSEDNQDAKNNNHVPIMSIVGHGGIGKTTLAQLISHDSRIKKHFDTVIWVAVSMSFDAKTLLDKIIQSVTLLKPSVDTYEALQQHLKKEIETIKYLLILDDVWEDKDISKWENLFSSLRTGVCGRKILLTTRMQSVADLASAVMRCEREFFPLCGLEEDENLRLFNHHAFINPDPQEFEDFQQVGEEIAKKLRGCPLVTKVVAGHLRAHMKVQFWNTFLHEHLDNFDGSMEDVVKVLKLSYYHLVPGLQVCFRYCSIFPKNHEFKKEELVKMWIAAGLISQTTGEAERAQDAAEEYLDLLNRKSFFELKLRNFRFGRNECHEYFVMHDLMHDLATWVSSGECARIADVASSKKLKPTVRHLSVAGIDGFPVDAIKSLSQFKNLRTIIIEDCHNIQDDTSREVEKVIESLKALRVVQYHMFSRSRFPGKEANLKHLRYVSVSMN

SEQ ID NO: 55377 - protein, 327 aa, Oryza sativa
MEAGGTAAGTRGGGGGAELCRQMAAQLAAYQRGMAVERERQASTSANYRAALLSSRSIARQTISRQEELSGLNLQLRNLEDGLAEALSVKAGKESKYQLTKETISSTAAINEKLEGMVTDQRNKRDHHAAVISNHLEAVEALEAKFIEDETRMKKIEEAVIWYSKFLGFQVVGGEGVKFIFNKIDLQSPDKEYSVTLKLAKDRYNLLQCDPSIKDSEELMKDLNLTNDLFKFVRIVRERFQAEAATVNGGLLMSSVVCPDASSIPVSPPMLMPLDSRTENVLDKSLSQSKNKGRNLPSKRGAAALSAASPGSAVSIVRRSPHFVGIR

SEQ ID NO: 55378 - protein, 380 aa, Oryza sativa
MTSSPAARRRPPGPLALGLESSANKIGIGVVSLSGEILSNPRHTYVTPPGHGFLPRETAHHHLAHLLPLLRAALGEAGVTPADLACVCYTKGPGMGAPLQVAAAAARALSLLWGKPLVGVNHCVAHVEMGRAVTGAVDPVVLHVSGGNTQVIAYSEGRYRIFGETIDIAVGNCLDRFARVLELSNDPSPGYNIEQLAKKGEKFIDLPYVVKGMDVSFSGILSFIEATAIEKLKNNECTPADLCYSLQETLFAMLVEITERAMAHCDSKDVLIVGGVGCNERLQEMMRIMCSERGGRLFATDDRYCIDNGAMIAYTGLLAYAHGMTTPLEESTFTQRFRTDEVHAIWREKEMPVLTNIRAHAMAEVSKDEASVPTPIAVDS

SEQ ID NO: 55379 - protein, 126 aa, Oryza sativa
MLSACSNSYRLNQGLFLLMRSYTATLGIPSLLVRSQLHSSGRLLLFVIIHACWKRRKPNHCSVLMPFLEQQQFLPRFLEEQLEHTATARASKGCVMQLLLELHHVTDTLQMQTTFSLLTEQALEFT

SEQ ID NO: 55380 - protein, 276 aa, Oryza sativa
MAVLLSILSSSFLLLLAASSSSTPRASACERCVRNGKAAYSPSLSPLPPGGGGGCGYGAMAMEMELNGGFLAAGGPRQHRGGLGCGRCFQMRCRNAEVCSNAGVRVVLTDFHRSNSTDFLLGGPAFAGLAKPGMAHKLKKLDALSVEYRRIPCDYKDKNLSILVEEQSKRPNNLVIKFLYQGGQTDILAVDVAQVGSSDWRFMTRVYGPVWSIDRAPNGPLQFRAVVTGGYDGKWVWADREVLPASWQPGQVYDTGARIADVARESCLDCATLDWK

SEQ ID NO: 55381 - protein, 85 aa, Oryza sativa
MGSVMGSLALAYHDAREFRMETKRKAEHEVNLLRPPALLHWDGGDGEQPPPLDERRRIVQRWIEYEKRKGPRRFEYLPGLRGWCK

SEQ ID NO: 55382 - protein, 220 aa, Oryza sativa
MAYDGDEEQSQDYLFKIVLLGDSSVGKSNLLARFARNEFYPNSKSTIGVEFQTQKLVIDGKEIKAQIWDTAGQERFRAVTSAYYRGAVGALLVYDISRRQTFDSVGRWLNELHTHSDMNVVTILVGNKTDLKHAREVSTAEGKALAESQGLFFMETSALDSSNVAEAFQTVVKEIYGILSRKVFQSQEQKRSEQSLSNGKPVMLSDSNEPTSGGRWCCSS

SEQ ID NO: 55383 - protein, 192 aa, Oryza sativa
MALHLFLLLLLAASLALANAAPPPNDEGATTIVLKDGTTCKLCASCDNPCNPSYYPPPPPPVVTPTPQCPPPPSYPSGGGGGGGGGTVMYTSPPPPYSGGGGGSSTGGGGIYYPPPTGGGGGGGGGWQQGGGGGGAYPTPPPPNPFLPYFPFYYYSPPPPFYSSGSSVAGVSAISSAAAATFTLLLTGLLLW

SEQ ID NO: 55384 - protein, 126 aa, Oryza sativa
MAAAAAMAASRRLLHLRPELGLRLRSRALIPYPSWTKAMGRCRYEPSPRRLSSCRRAAKNERPWRSSSNEQLTDGDGTAKYMGRNFPDEFAQLSLEEEESDDEVHGISETMVKDVEKAAVELLAGR

SEQ ID NO: 55385 - protein, 593 aa, Oryza sativa
MAAAAAALLAFVAVAGALVAQATDPYVFFDWDVSFITASPLGLPQKVIAINKQFPGPVMNLTTNYNVVVNVLNSLDEPLLITWDGIQQRKNCWQDGVLGTTCPIPPGWNWTYNFQVKDQIGSFFYFPPLSLQRAAGGFGGITVNNRAVISVPFDTPDGDITLFIGDWYKKSHTDLRKMLDDGKELGMPDGVLMNGKGPYRYNDSLVPAGIEHETIKVEPGKTYRFRVHNVGISTSLNFRIQNHNLALVETEGSYTMKQNFTNLDIHVGQSYSFLITMDQNASSDYYIVASARFVNESLWTKVTGVAILQYSNSKGKASGPLPDPPNDEYDKTFSMNQARSIRMNVSTGAARPNPQGSFHYGSINVSQVYKLRNEPPVTINGKKRTTLSGISFSPPDTPMRLADLYDKKGVYTLDFPTMPIDGPPVMKTSVINSTYKNFLEIVFQNNDTKVQTYHIDGYAFWVVGMDYGEWTENSRGTYNKWDGVSRCTTQVFPGAWTAVMLSLDSPGFWNVRTENLDTWYLGQETYIRVVDPDGGYNVTEMVAPDNMLYCGLLKDKQKAQKPHGSSSSSSSAASPNRYWLAVVVSLVAAVFVQ

SEQ ID NO: 55386 - protein, 370 aa, Oryza sativa
MAAKSLREIRRAAAAGIGSRRCFPGDAAATAAAAAGVAEGKVGGGAGKEVNLFTAINQALHIALDTDPRSYVFGEDVGFGGVFRCTTGLADRFGRNRVFNTPLCEQGIAGFAVGLAAMGNRAIAEIQFADYIFPAFDQIVNEAAKFRYRSGNEFNCGGLTIRSPYGAVGHGGHYHSQSPEAFFCHVPGLKVIIPRSPREAKGLLLASIRDPNPVVFFEPKWLYRLAVEEVPEEDYMLPLSEAEVIRKGSDITLIGWGAQLAVLEEACEDAAKDGISCELIDLRTLIPWDKETVEASVSKTGKLLVSHEAPITGGFGAEIAASITERCFQRLEAPVARVCGLDTPFPLVYETFYMPTKNKVLDAIKATVNY

SEQ ID NO: 55387 - protein, 518 aa, Oryza sativa
MSQHAVCCGAMFWVYLMSCVGLVMFAGLMSGLTLGLMSLSLVDLEVLAKAGTPTDKDNAARILPVVKNQHLLLCTLLIGNSLAMEALPIFLDSLVPSFGAILISVTLILAFGEIMPQAICTRYGLSVGAKAAPVVRVLLIVFFPVAYPISKLLDWVLGKGHVALMRRAELKTLVDMHGNEAGKGGELTHDETTIITGALEMTQKTAKDAMTPISETFSLDINAKLDLHTMGMIMTKGHSRVPIYSGTPNNIIGLILVKNLITCQPEDEVPIRNVTIRKIPRVSDDPPLYDILNEFQKGHSHMAVVVRRIKEPGASIEKTYSDRSDYKTNSDRSDYKINHRDAHADGLSPSRVSIAGSRRSNIEKNGEVRLYKKSEKKRDNILDFNSGPLPSYSLDQEAVGIITMEDVMEQLLQEDILDETDEYVDVHNKIKINMLPLGKSLSPTISPSNGPHSQGLRRTPMTSPLSSYHHGGSILRSPASNNPQSPGTLPTIISPERSPASQAPSRSSPNSTQVSRNS

SEQ ID NO: 55388 - protein, 175 aa, Oryza sativa
MEGSGAQPVGGAAAAAAAPKRNNMDYTLAALKLFGCQLAGATEAPPSESDGTSQAQMLYGIRFQRVWLQGVVVLADYRDGAGHILVDDGSCVAEITLTPKEAEGQPWREGMYVMVLGSYSGKESLPRANRPVIKVHKLVDLSAQPDRESMWYMEVVEAFNFFYLQFSAASPLMKR

SEQ ID NO: 55389 - protein, 525 aa, Oryza sativa
MLQKQISLPNSPMSSLLFSQQQQRLAQVQVQPSHQNYLNLPPHIFYQHHSPELTGRFDSVSSVPSSRDKRSRSGRGKHNIRFSQPLPDTGNQNGDSGGIKFRSKYMSSEEIESILRMQHSASHSSDPYVVDYYHQACIAKRGANSRPKANFAPTSMKDLPSKSRSSGDHHAYLQVDAVGRVSFSSIRRPRSLLEVDLPSSSDGSHDQKSSLRPLEKEPMLAARVTVEDALCLLLEVDDIDRLLQSSQAQDNSFQLRRRRQVLLEGLAASLQLVDPLGPSTSSHSSGLAAKDDLVFLRIVSLPKGRKFLSRYLRLLTPGSELTRIVCMAIFRHLRYLFGGLPSDSSAAETTVTLAKTLSSCVRHMELGALSACLAAVVCSPEQPPLRPLASSAGDGASLIIKSVLDRATELLTDQHAAASYTVSNRTLWQASFDAFFGLLAKYCLSKYESIRQMFTMQSPGSVIGSEVSKATSREMPVELLRASLPHTNDQQRQLLLDFAQRTMPVTGFNASGANGGHITSESVPG

SEQ ID NO: 55390 - protein, 608 aa, Oryza sativa
MQVQQRKPKACAESAAAARGADQQQCDGRPLEAGEESLERSVPRKRKPAAAVAAAEKRWSSVAYVVLAAFVMATVFAVLGGRRPAVWIAATKALRRGSDDKSIPLARSAADKLLGGLLPEGFDEKSCRSRYESYLYRRNPGRRPSPHLVARLRMHEELQRRCGPNTESYNRAVQRLRGGGAAEADAHSPDDEQCKYVVSISYRGLGNRILAAASAFLYAVLTGRVLLVDPSNEMDELFCEPFPGTTWLLPRDFPLASSYANFSADTAESYGNMLKNKVLGTDGSTDGDMPAAQMPAFAYLHLDHDYGDGDKMFFCDDDQRLLSNIQWLVMRTDTYIVPSLFLVTTFQDELDALFPERDAVFHHLGRYLFHPANHVWGLVARYYRAYLATARQLVGVQVRVFDHRQAKSPHVVLEQITSCAWKEKLLPEVLDAVEDAAMPTPPTTPHGGSNNSKAVLITSLRPWFYERVKAMYWERATATGEDVSVHQPSHEEYQHFGEKSHDGKAWAEMYLLSLCDVLVTSGWSTFGYVAQGLGGLRPWVMYKPVNITAVPDPPCGRDVSMEPCFHSPPFYDCKTKRGVDTGTILPHVRHCDDVSWGLKLVDPNGSPN

SEQ ID NO: 55391 - protein, 115 aa, Oryza sativa
MESHCKIHVKEGNLMQLACPDTNCRNPLPPSVLKSLLRDDGYAQWESFALQKLLDAMPDLVYCPRCSAACLEVDNDAQCPGCFFTFCTLCKRRRHVGDTCITPEEKIRILKVTIA

SEQ ID NO: 55392 - protein, 48 aa, Oryza sativa
MLSAGFTVNLEYSLLVLHDEVPSIIYIDCICSYFVYLNLASLHGLVSL

SEQ ID NO: 55393 - protein, 337 aa, Oryza sativa
MAAATEQHCGGGGGDKEKDLLSAVVGDIRSYSGSDPLRPWLRGMRKMEAALPPATLRAKLPRFLQKCAQEFQDDARYRDDSRYLRVWIQLMDYVKDAKPLLKKMEKNRIGLKRSAFYMAYAVYYEKHKRFEDAENMYRLGTQNLAEPVGGLQKAHEQFIRRVELYKRRKSRVQQERMPNKVQSIAISKNEVEGQSRSCTKPKSNPVQRSGSGSNPHLGFPHPLGRPLSRGTSGETMSLSRHNSDDTVVVRFVGSALVGKSETEDACHHGLVEPTINTKEAMDAISSMFLEPLEPETKLKRRSNRDKPSFNQEASAFEIFVDEDNLTRVDPANSRTKT

SEQ ID NO: 55394 - protein, 160 aa, Oryza sativa
MAQESWKKEAEETGVHTPEAPILCVNNCGFFGSRMTENMCSKCYRDTVKAKTVATVVEKKPLASLSSTPLVTEVTDGGSGSVADGKQVMEEDTPKPPSNRCLSCRKKVGLTGFKCRCGGTFCSMHRYADSHKCTFDYKQVGREQIAKQNPLVRADKITKI

SEQ ID NO: 55395 - protein, 331 aa, Oryza sativa
MPALRMNKMLSTDYLGTQELHSFCKTTEILEDSQSQEIALDRTAVGSTLLSHQNVCSTSEVSGGNFGIAEVSFLQDEYDAETTGVLPPSFLSCGSRSMLPISVPSSSSSSLETVLFSDSTYSDLQVKETNHNTTAMDENNEFLQLILSSNDEGYNAGSEFQVWDVLDFYFSESFSAVQFDSLMGFTNDVSSSHHDCMNLVDMVERPVALLSLNDTEEQNNSTDEFPDDTSSYLQMKPSDSETESNYASRDVAVTEYVDEKPLSRGLPDLMDVDSPGRLSKSARSKQITLVLDLDGRLAVTSHHSILPLIECSCSEFVSYSTSAGKQLMTSY

SEQ ID NO: 55396 - protein, 289 aa, Oryza sativa
MARHQLCLLTTTMLVAVVVFLPCLATATGKTGQIAVFWGRNKTEGSLKEACDTGLYTTVIISFFSVFGHGRYWTDLSGHDVSRVGADVKHCQSKNIPVLLSVGGDGYQYSLPTANSAKDVADHLWHAYLGGGRRGVFRPFGDAVLDGVDLYIDHGGPANYDVLVRRLAGYRGKPVLLTATPRCVYPDANAGGAGDGAGAAHPPAVLRRRGVHEQDRRRGAEEPVRLGGLGRVDVAVPGEPGVRGASGGGDGGGLDKPGVALLRRDAEGADSEQLRRRHAVGPRRRQSLR

SEQ ID NO: 55397 - protein, 200 aa, Oryza sativa; identical to SEQ ID NO: 28926

SEQ ID NO: 55398 - protein, 675 aa, Oryza sativa
MFDSLLNSKFYNKCKHAIKCTRTRLDLVRRKKQAMVKFMKKDVADLIGNRLESHAFGRMEALIVEMNQASCYDMIEQYCEYIVKQLNNLQKQNECPQEALEAVSTLIFATARFPELPELCDLRHMFTERYGSFVEPFVSSEFVQKLQNKSFTNEEKLQVMQSIAEEFSVPFNSKALERKISGVPQNKHDLQNKSSFKRVEVEASACNELKVDRHAVHERKSKVTPEVHERKQEMPVKPKDIHVIPDAIGKVGEKSRKNRSDIPYDVPPSDLKQINDQELKKDHKKHSHHQRELRNADKSAPPYAEPKEDVAEKSDGKGYHVHRSRMAGGLDHNWGHADLGLKTLGLEKQGIEPASSLDGKTLNKAPPYSKPYKASDEYGQSVQDRQKMPEKAVNMRPPYVKPNSTNQAVDDYKHAGTGEIGHQRDGLADDNTLQPVSVRRKSAKPPTHGDRYDDEAKMTSQTPGGRRRHSSRRNGSDDDYDQRVGYMLPPDDDAVNNARHFKRMSERRKHGSRQGGSASGNDYESDEDETNSVIDFGNLLPRAPSSHRKHRSRSAHPRSGGRDDEERVMDKLLMHYSKKGIDREEHKTRTKSRTPRPRADQPADGVGERSNREVAPQHPPERTVSLPSDSGNLGVKPKAPARSISMQPDKSRGIVHPSMPDFDELAARISALRKE

SEQ ID NO: 55399 - protein, 414 aa, Oryza sativa
MEEIVGSAIVQETVNRIISGLIDRCERKSSARDHLERLEMAQIKLEFALETSNKWQITSGPLLRWQKKLKRATEECDDTLRKCRQHIQEEDEVEQQVRNSSFPRRIAHATKTLVSSIFHSNSDELGRSSVQRFEWFADGANDFLRSVEFGGTPRRYLFFDPLIGHLISGETLEYKSIQGNKQHWFWVRPNNSAERGIEAKLFFAFNDGSAPEDNFYIDIILQLSESTNIVGTTIKCLQLFTPYFESTAETVRKELIQLPTQDFSRVSHSHSYGWENIHSIATEWFRPNPLCCKHHGQKVCGSGNLHKVELTDISLEPIIEVSLLCQVSPPGFREQGTIVEGKSSLKEFPHLNVILVYTPHGSSEDLFPAVDSTVIEVINGNEQHCLHTNVHAAKGCRLFSSECKSNSVSDALEV

SEQ ID NO: 55400 - protein, 828 aa, Oryza sativa
MERTWMNCKLFSKEHREGVTEFMDFVCKNLSGSQKILCPCRKCLNRLHQYKGRVEDDLLMYGMSNTYTRWIHHGEPLVIVTGNVEHLNEDIGCNVEHLNEDVSCNVEFETNEPPDDPEDDQMYRMVQDLYPDQNHGPRTKSKFATILEEMKQVLHPGGPYTRFSFVVKLLHIKSFYRISNVAFSAFFDLLSSAFPNCSLPASYAEAKNFIRALGLGYESIHVCPNNCVLFRKELAKKDACPICGASRWKDADSRRKIPEKVLRHFPLIPRLKRMFGSKELSAEAQWHKLKRKPVDNELSHPADGEAWKDFDRKYEWFANDARNVRLGLATDGFNPFGKMSSSYSMWPVFLIPYNFPPWQCMEQSNFMMCLLILGPTCPGKDMDLFLQPLVEELLNLWSGVPTLDALTGKEFDLHAAIIWCIHDYPALSTLSGRVTRGYYACVCCDKNPCYKRLRNKICYIGHRRFLPVDHIWRRKKDFNGQTEERAQPEEFTQDELMQQLARVEHVRPGNHPNNKKRKRVEEGQCWKRRSTLWDLPYWSNLKLRHNLDVMHIEKNICEALLGTFLDIAGKSKDSVTARLDLEDMGIRKNLHLKDDGNSTCTAPHAPYVMTKAQRKAFCAFIKNVKFPDGYASNLARCVSVDECKVQALKTHDCHILLQRILPAGLRGIMHKEIYETIAELGNFFQQICAKKLKLDALNKMRGEIPIILCKLEKIFPPAFFDVMVHLCIHLIDDAILRGPVQYGWMYPVERRLLTLKRFVRNMARPEGSIAEAYVANECLTACSRYFADVDTRHNREGRNKERVPMSRCGLSIFQHGANLLGAPRLTYE

SEQ ID NO: 55401 - protein, 318 aa, Oryza sativa
MGPATAIFVGALFLPETPNSLVEMGRLEEARRVLEKVRGTRKVDAEFEDLREASEAARAVRGTFRSLLAARNRPQLIIGALGIPAFQQLSGMNSILFYSPVIFQSLGFGNSAALYSSIITGSMLVVGALVSMVVVDRLGRRFLFIEAGIQMISSMVVVAVILALKFGHGEELSKGVGTVLVVAICLFVVAYGWSWGPLGWLVPSELFPLEMRSAGQSVVVCVNLFWTAAVAQCFLAAMCHLRWGVFILFAALIVVMSIFVILLLPETKQVPIEEIWMLFDKHWYWKRIVRKDPKYQGHHHHQMAAMPTAAAKSGSSEV

SEQ ID NO: 55402 - protein, 352 aa, Oryza sativa
MAMGMEGSGGGGSAKKKEESLPPGFRFHPTDEELITYYLRQKIADGGFTARAIAEVDLNKCEPWDLPEKAKMGEKEWYFFSLRDRKYPTGVRTNRATNAGYWKTTGKDKEIFTGQPPATPELVGMKKTLVFYKGRAPRGEKTNWVMHEYRLHSKSIPKSNKDEWVVCRIFAKTAGVKKYPSNNAHSRSHHPYTLDMVPPLLPALLQQDPFGRGHHPYMNPVDMAELSRFARGTPGLHPHIQPHPGYINPAAPFTLSGLNLNLGSSPAMPPPPPPPPQSILQAMSMPMNQPRSTTNQVMVTEQMIPGLANGVIPQGTDGGFTTDVVVGGTGIRYQNLDVEQLVERYWPGSYQM

SEQ ID NO: 55403 - protein, 377 aa, Oryza sativa
MERALMSLMRRRSLLQSGGRAPPAMAAAAGGSPFFSTLQQAAAADPVQSPGILPGLKIRDSASQLIGRTPMVYLNKVTEGCGARIAAKLEFLQPSFSVKDRPAISMLEDAEKKGLITPGKTTLIEPTSGNMGIGLAFMAALKGYELILTMPSYTSLERRVTMRAFGAKLVLTDPTKGMGGTVRKAAELYENHPSAFMLQQFENPANVKVHYETTGPEIWEDTLGQVDIFVMGIGSGGTVTGVGKYLKEKNPNAKIYGVEPAEANVLNGGKPGPHLITGNGVGFKPEILNMDIMEKVIEVKGEDAVKMARELALKEGLLVGISSGANTVAALELAKKPENKGKLIVTVLPSLGERYLSSALFEELRAEAEAMQPVPVD

SEQ ID NO: 55404 - protein, 63 aa, Oryza sativa
MARRAKLTINLKLRKSTINVEQLIHVRLRQILNFMGGKTAYIKFDGTVGVPILRSKRVPPSED

SEQ ID NO: 55405 - protein, 308 aa, Oryza sativa
MPKPNHRARSAAAGGGGGGGGPIDADWKYFLDNVREEGHSYAVRVPADGANPSYYLQYEKPLTNGAASTSSRGGAARKRCRMEEEEEEESSSGEPEPAPDPDIEEDYRVFLQNVRLVGHGGFVLEHEGNVIRYDASGAALSSDESSDESVMGAPEPDPRRRKAKIVEEDQEEEEDVKNEVAVPSRKKDFTMVKEDQEKKGKRVVDLPARGEDGAMVAEEDRKKKLRKEFNFHSFHSKGKDDTTPVKNLKDKKKEVKNPKDKKVHGKKEVALSAKGKDCQLAEGVVIKVEEEDGAVADCAGCGETSDYN

SEQ ID NO: 55406 - protein, 397 aa, Oryza sativa; identical to SEQ ID NO: 31091

SEQ ID NO: 55407 - protein, 86 aa, Oryza sativa
MATEGECAAATIAMHAAVMATKGEHRFSGGDAQSLCLPPLAASFPPPFSLHRHQPPFPLHRRVGEEGSGTGKEVWQRRGVWRGGGS

SEQ ID NO: 55408 - protein, 121 aa, Oryza sativa; identical to SEQ ID NO: 30129

SEQ ID NO: 55409 - protein, 502 aa, Oryza sativa
MRSRSPSKRRRHGSRGRSPPSSRHGCAKDKEGAAVSLFVSNLPRSCRPEDVQVPFQKFGPVRDVYLPKDYNTGEPRGFAFVEFAHSSDASKARYHMNRKMLSGREISVAFAVQTRKRPEEMRRIIGARHNSPQRKEECRTNSPGQPKGHDEKRKRRSYTPKYKDRQYADIGRDETPPAPDSERPWALCRSPRPSPPGQSHSRSYSRSHSLHLHDHARTRSCSPAPGRQDDQYASPQRKEHQTKSSGQTKGHDDMRRSYTPEYNECQDADNGFDETPPAPDGERSSVLGRSPRPSPPGRSHCHSHSRSRSPELRGHARSRSCSPATGRQDNQSTSPQRREKHQTKSSGQAKEHDEKRRSYTPEYNDRRDADNGYDQTPPAPDGERSWALGRSPQPSPPGRSHFHSHSRSRSPELRGRARSRSCSPAPGRQGDDQYASPQRKEEQQTKSSRQTKEHDEERRSCTPEYSDRRDAFIGHDETPPSAEWGSKLGTVQVISNTAASSN

SEQ ID NO: 55410 - protein, 751 aa, Oryza sativa
MAPVDQLNRVVGPILFTLRSSPDATYVMLGNILVFAKTAPQLFAPFYEDFFICTSDPYQTKALKLEILTTIATESSIPAIFEEFQDYIKEPDRRFVADTVAAIALCAQKLPSITTSCLGGLLALVFYESSISDSANFDGEAAVLVQAILSIKAIVRTDPASHEKVIVRLVHSLDKIKEPAARSLIIWIFGEYSSIGNIIPKITPAVLKYLAWSFAAEMLETKLQILNAAAKVIIHSPEEHLEEFKKIMAHVIKLATCDLSYDVRDRARFISRLLPYSTTYLNGNNSSCQSHNEDMFKELANHIFDGKMPSTFHPTNNYRIYLPGSLSQVILHAAPGYAPLPKPQSMELIHKTMEPTRGVGNSSESINSDAESGSSTYDGGSVYDSESEVDGSSDRNAADSNTKDNQEDPLVHVYDASVDQGQTARDVEDNFASLITTDLTELMSKSALETWLDEAPAEPVQVSTQASSARVSFTNRSFERKPKLHMLLDPSNSNGLSVLYAFSSEVSPVSRLLVCVDLLFENVSTNQLADITIKSEEASGSEDGLDQTLQGSASVPTIVLDKEIQLLAPEQTEKMVLQVHFHHHLLPLKLSVLCNGKRHPAKLHPDIAYFVRPLPMDLNAFLCKENQLRGMFEYARRCTFKDHLQKLEHNDDSEEHTDKNLLIAQSLASKILSNANFHLVSMDMPVTFSIEDASGLCWRFSSEILSTSNPCLITILAEGHISEPLDLTAKVNSEDTAFGLNLLNRVVAIIE

SEQ ID NO: 55411 - protein, 130 aa, Oryza sativa
MARGVSYVSAAQLVPMLRDPRIAVVDVRDEERIYDAHIAGSHHYASDSFGERLPELAQATKGKETLVFHCALSKVRGPSCAQMYLDYLSEADEDSDVKNIMVLERGFNGWELSGRPVCRCKDAPCKGVCS

SEQ ID NO: 55412 - protein, 699 aa, Oryza sativa
MSSQGAGGGVGDPELFAELWRACAGPLVEVPQRDERVFYFLQGHLEQLQEPTDPALLAEQIKMFQVPYKILCKVVNVELKAETETDEVFAQITLQPDPDQENLPTLPDPPLPEQPRPVVHSFCKILTPSDTSTHGGFSVLRRHANECLPPLDMSMATPTQELITKDLHGSEWRFKHIYRGQPRRHLLTTGWSTFVTSKKLISGDAFVYLRSETGEQRVGVRRLVQKQSTMPASVISSQSMHLGVLASASHAIKTNSIFLVYYRPRLSQSQYIVSVNKYLAASKVGFNVGMRFKMSFEGEDVPVKKFSGTIVGEGDLSLQWSGSEWKSLKVQWDEVTNVNGPERVSPWEIETCDGTAPAINVPLQSATKNKRPREPSETIDLQSLEPAQEFWLSGMPQQHEKTGIGSSEPNCISGHQVVWPGEHPGYGAVSSSVCQNPLVLESWLKDFNSSNKGVSPTLSEISQKIFQVTSNEARIATWPARSAYQAEEPTSKLSSNTAACGYRTEEVAPNASKVVEGKKEPAMFRLFGVDLMKCTSISTTTDDKSSVGAGEASAKGTGSHEDSGQLSAFSKVTKEHIAADESPQEIQSHQNYTARTRIKVQMHGNAVGRAVDLANLDGYEQLMNELEEMFNIKDLKQKWKVAFTDDEGDTMEVGDDPWLEFCQMVRKIVLYPIEDEKKIEPHPKLLSSANPEQDQKTGF

SEQ ID NO: 55413 - protein, 729 aa, Oryza sativa
MGTEAEAAEVVESVSDLAVQDPPGEEFSAADLRWVKYASSEHQRDDVALIPYERMDAFIAGECSNPECPTRFHIERGRKRDRGTLREVRSDDYLLYRMYWCSFGPENYGEGGTILPSRKYRLNTRNRAARPQSMRGCTCHFAIKRLYARPSLVLIIYHERRHINKSGFICHGPLDRDAIGPGARRVPYVGSEIQQQTMSLIYLGVPEENILQTHMEGIHRYCGSDAKVDSLASQYVQKLGMIIKRSTHELDLDDQASIRMWVDRNKKSVFYYQDSTDTDAFVLGIQTEWQLQQMIRFGHQDLLASHSSFGVSKLKYPLHTLLVFDSRQHALPVAWIITRSVTKQDTLRWMKALTERIYSVDSTWRIGGFVIDDPASELDPIRDVFSCPILFSLWHIRRTWLKNIIKKCSNSEVQREMFMQLGKVMYSIWSEKNPMDALEQLFQDFVDQTTFIQYFKSFWVPKLEMWIDTIRSLPLASQESSGTIEGYHLKLKVKAYDDSQLDALQRVDWLVHKLTTELHSSYWLNLYADESGSFPEVKAEYIASTSWHRALQIPDDAVIFDDKEPFSAKVTSQKDTSQMWTVWNPGSEFSLCDCSWSMQGNLCKHIIKVNMMCGPRKDFQPSLSFQSFQRVLLDLWQKPMDDSFSLDLSVAWVMQMQERIQKVTELATADGIAEVSNRLPIQWTNKKGRKVAAKRTSPLRVLPHSNGIVQKDFTPKKNRKRKRLSTVSG

SEQ ID NO: 55414 - protein, 432 aa, Oryza sativa; identical to SEQ ID NO: 37640

SEQ ID NO: 55415 - protein, 848 aa, Oryza sativa
MATVIVILLLLPLLPSTALAAFPYFLACGAASNVSFPGDSPARTFVPDAPFLSSAGRVPAVTSTGSNTIPPLYAAARAAGSGFSYSFADPDTATVNVSRVLRLHFFPFTSSSSVNLSSASFSVSVRDAYTLLSSFSPPRDGVVKEYFVPGDGSGEFRVKFTPDAGSTAFVSAIELFPAPPELLWRRPVKPVGALVDSVDVNAWPQQALETVYRLNVGGSKVTAANDTLWRTWLPDDPYFSSPRGLSQVNSTSTPIIYGTSIGYTREVAPDSVYKTQRAMNMASQQLFLTPGPFNLTWTFALPPPAPGSDSDYLVRLHWCDYSLVSSVVATGIVFDVYVAQRLASKDLDRNAADAAEQPNEAFYLDYAATAPTTGNLTISIGKSDKSDAGGMLNGLEIMKLRRADNLNSAGSHGRRKKILIGTLSAALGVAVLACALLCLLAVLRRRRQAPTPAPEEKESTQLPWSQHTQDGSSWVDMSNASGAGMTGGLHRMSMQLNISLADITAATENFNERNLIGVGGFGNVYSGVLRDGTRVAVKRAMRASKQGLPEFQTEIEVLSRIRHRHLVSLIGYCNEQSEMILVYEYMEKGTLRSHLYGSEEPPLSWKQRLEICIGAARGLHYLHTGYSENIIHRDVKSTNILLGDAFIAKVADFGLSRIGPSFGETHVSTAVKGSFGYLDPEYFKTQQLTDRSDVYSFGVVLFEVLCARTVIDQSLERDEINLAEWAVSLQQKGELAKITDPRIAGQVNGNSLRKFAETAEKCLADYGLDRPSMGDVLWNLEYCLQLQETHVNRDAFEDSGAVATQFPADVVVPRWVPSSTSFLMDDSVTDSGIANSKAFSQLSSGDGR

SEQ ID NO: 55416 - protein, 442 aa, Oryza sativa
MGISAKWIKSLVGIKKHEKAQTSESSGVRSSTAQLLHKRKHSIDTESAAAVEELSVQTEPLACDTNIQAISNITSSPGTTLQVSQIELDTRENHAAIVIQSAFRAFLARRALRALKGLVRLQALVRGHAVRKQAAETLQCMQALVRAQARVRARRVRISLESQVTQKKASEQNVHEDHVWEIEERWCDGIGSAEQMQAKVLKRQEAAAKRERAMAYALTHQWQAGSRKQKAATLQGLEVDENQWSQNWLERWMAARPWENRLLDTNAKESAPTGDDNHADENEAKAPNKPKGKVSISTTHPNGSNKKNGANHKKSHSDISGSSSGQSAGVLPTNSLGSSKLKPKPSDEISEEVNSQPSNLASRSTSNPKERPTQVNASSKKRLSLPNNGTMGGGVGKGATNGRTNQSMSSKNAAKGSSKLESKQQQRPNPPNTTVKRVEVKA

SEQ ID NO: 55417 - protein, 657 aa, Oryza sativa
MGFEETYFSAFCYLLLFPVSWKCQAAELDMAQTAVLEVDASWNLSRKIPDTLFGLFFEEINHAGAGGIWAELVSNRGFEAGGPHTPSNIDPWSIIGDESSIYVTTDCSSCFRQNIVALRMEILCDNCPAGGVGIYNPGFWGMNIEEGKAYNLVMYIRSLESVELTASLTCSDGMQNLASVSIQGIDLSNWTKIELQLLAEGTCRTSRLELTSMKKGIIWFDQVSLMPSDTYKGHGFRKELLYMLLELKPQFLRFPGGCFVEGDWLRNAFRWRETIGPWEQRPGHFGDVWNYWTDDGLGYYEFLQLSEDLGAAPIWVFNVGISHHDEVDTTIIEPFVKDVLDSLEFARGRAESTWGSVRAAMGHPERFPLKYVAIGNEDCDKGFYRGNYLKFYDAIRKAYPDIQMISNCDGSSRPLDHPADLYDFHVYTSAANLFIMKNKFDRTSRIGSKVFVSEYAVNEQRDAGKGSLLASLAEAAFLTGLEKNSDLVQMASYAPLFVNDNDRTWNPDAIVFNSWQQYGTPSYWMQTYFRESSGSVIHPITIGSSYSDSLAASAITWKDTHDIFLRIKIVNFGPNAVNLAISSRGLQAGVNTAKSTVTVLTSGNLLDENSFAEPNKVVPVKSELPDASEEMEAALSPYSFTSFDLALDQYSKLVAEM

SEQ ID NO: 55418 - protein, 488 aa, Oryza sativa
MGAFAAALLALLLAAMAAPPAEAAVGVNWGTLSSHRVPPPVVVDLLRANRIGKVKLFDADPAVLRALAGSGLQVMVGVTNAELAAVAGSPAAADAWVAQNVSRYVGRGGVDIRYIAVGNEPFLTSYQGQFQSYVIPAMTNIQQSLVKANLASYVKLVVPCNADAYQSASLPSQGVFRTELTQIMTQLAAFLSSSGAPFVVNIYPFLSLYQSSDFPQDYAFFEGSTHPVVDGPNTYYNAFDGNFDTLVAALGKIGYGQLPIAIGEVGWPTEGAPSANLTAARAFNQGLMNRVMNNKGTPLRPGVPPADVYLFSLFDEEQKSILPGNFERHWGIFSFDGQAKYPLNLGLGNPVLKNAREVPYLPSRWCIANPAQNLDNVANHLKLACSMADCTTLDYGGSCYGIGEKANVSYAFNSYYQQQKQDAKSCDFDGNGMITYLDPSMGECRFLVGIDDSKSSAVSSCGCGCGVCCGVWVLFFWVFMYLRMMGSV

SEQ ID NO: 55419 - protein, 417 aa, Oryza sativa
MALRFEVLGRFNRARAARLTLPHFTCQTPLFMPVGTQGTIKGLTTDQLEEIGCQIILGNTYHLELRPGSQLIDDLGGLHKFMNWKRALLTDSGGFQMVSLLHLADITEEGVTFQSPVDGKPMLLTPEESIHIQNNIGADIIMALDDVVKTTITGPRIEEAMYRTLRWIDRCIAAHKKPDVQNLFGIVQGGLDPVLRDICVKGLVERNLPGYAIGGLAGGEDKDSFWRVVAQCTAGLPEDKPRYVMGVGYPLDIVVCSALGADMYDCVYPTRTARFGTALVPEGVLKLKQNAMATDERPIDPTCPCMVCKNYTRAYLHCLVTKDAMGSQLLSYHNLSFMMRLSRDLHMSILEGRFPEFVRGFLRMQFPKGDVPKWVRNAMVVAGIDISECCTPAKYPRDAMDAPGTDIPELLPPTNCS

SEQ ID NO: 55420 - protein, 87 aa, Oryza sativa
MCHITSIITMSESPSCLRGIRCFFVLGLCGPLQLSLLLLVHTTMFHSRPSSTAALTSPISYHRHHGSKSHTPSNGVHQSSLQVIHLE

SEQ ID NO: 55421 - protein, 382 aa, Oryza sativa
MDRRRACMLAAMIGTYYLELYSNKAPRRGAPESGHDWVMRTLANRTACYNMFRMHRPVFERLHSVLVESYELKSTNNMDSLECLGLFLWIVGAPQLVRQAQDRFVRSLNTVHSKFKAVLTALLKLAQDIIRPKDPLFTTVHKKLLSPQYTPYLDNCIGAIDGTHIQVVVPNSAAVQHRNRHKEKSQNVMCVCDFDMRFTFVLAGWPGSVHDMRVFNDAQTRFSAKFPKPPPGKFYLVDSGYPNRPGYLAPYKGITYHFQEYNESTLPRGRREHFNYCHSSCRNVIERSFGVLKNKWRILFSLPSYSQEKQSRIIHACIALHYFIRDSQMADTEFDNCDHDENYDPLGGTSSPSSEPTNELDSRVMNQFRDWIADGLWYLKGM

SEQ ID NO: 55422 - protein, 62 aa, Oryza sativa
MATETASQMKETVSADAKKEKKQTKYKDAPPTAFDLFKMCHCNSNTSFNEPVKNVIAEMGVH

SEQ ID NO: 55423 - protein, 82 aa, Oryza sativa
MPSEKEKYCNKGSTEKKLHTTKQMLDLFAHSLELHRNEGHLLQQNQQKYNMLVNEINMICAQSALYLPKHVKWLGQPAWPNK

SEQ ID NO: 55424 - protein, 1033 aa, Oryza sativa
MSSPIAIGRRHGPPPLLLHLLILHLLLGFQHLCYSLATYSNRSTAAMPAPCLPDQAAALLRLKHSFNMTNKSECTLASWRAGTDCCRWEGVRCGVGIGVGHVTSLDLGECGLESAALDPALFELTSLRHLNLAWNNFSGSHIPTIGFERLTELTYLNLSNSKFAGQIPNTIGRLTNLISLDLSTDFFLIDLDDEFLSVATYSPAWLLVAPNIVSIVANLHNLKELYMGTIDLSSNSMVQWCSAFSNSTTPQLQVLSLPYCYLEVPICESLSGIRSLSEINLQYNFIHGPIPESFGDLPSLSVLSLTHNSLEGSFPSRIFQNKNLTSVDVRYNFELSGSLPKNISSNDILVDLLVSSTNFSGPIPNSVGNIKSLENLGVASSDFSQELPSSIGQLRSLNSLEITGAGVVGAVPSWIANLTSLTLLDFSNCGLSGKIPSAIGAIKNLKRLALYKCNFSGQIPQDLFNLTQLRVIYLQYNNFIGTLELSSFWKLPDLFSLNLSNNKLSVVDGEKNNSSWVSINYFYTLRLAYCNISNFPSALSLMPWVGNLDLSGNQIHGTIPQWAWETSSELFILNLLHNKFDNIGYNYLPFYLEIVDLSYNLFQGPIPITGPDTWLLDCSNNRFSSMPFNFSSQLSGMSYLMASRNNLSGEIPLSICDARDILLLDLSYNNLSGLIPLCLLEDINSLSVFNLKANQLHGELPRNIKKGCALEALDFSENMFEGQLPTSLVACRDLEVLDIGNNQISGGFPCWASMLPKLQVLVLKSNKFTGEVGSSAIEKDNTCEFANLRILDLASNNFSGTLHHKWLKRLKSMMETSSSATLLMQYQHNVHSTTYQFSTSIAYKGYEVTFTKILRTLVVIDVSDNALHGSIPKSIGELVLLRGLNMSHNALTGPIPSQLGALHELESLDLSSNDLSGEIPQELAQLHFLSVLNLSYNGLVGRIPDSPQFSNNLSYLGNIGLCGFPLSKECSNMTTPPSSHPSEEKHVDVILFLFVGLGVGIGFAVIIVVTWGIRIKKRSQDSRFPFWKKVLCM

SEQ ID NO: 55425 - protein, 331 aa, Oryza sativa
MAKKRKRSSDAAAAVEKPDEFAPQRPERTLFGFKEKPADDEEAEAEAASEGEEDAAAAAAAAPFRNKEKVLVTCSRRINYRYRHLMQNVVSLLPHAKKDSKVESKQSKGNALNELLELRNCSSCLFFECRKQKDLYLWMVKSPGGPSVKFLVNAVHTMEELKLTGNHLKGSRPLITFSTNFDEQPHWQLVKEMLTQIFATPKDHRKAKPFHDHVFVFSIVDDHVWFRNYQISVPHNEIDKVDKGGLDKMTLVEVGPRFCLNPIKIFGGSFGGPTLYENPFYVSPNQIRALEKRKKAGKYAKKVKAKVRRKMHEMENTLEPDEFAELWKGED

SEQ ID NO: 55426 - protein, 51 aa, Oryza sativa
MRPPRVAAAVGPARLSHRWRERRDLELWPKIAAERERERERERAATDQRAE

SEQ ID NO: 55427 - protein, 401 aa, Oryza sativa
MASDNIGSRDVCVVGVARTPMGGFLGALSSLSATKLGSIAIEAALKRANVDPALVQEVFFGNVLSANLGQAPARQAALGAGIPNTVVCSAVNKVCASGMKATMFAAQSILLGINDIVVAGGMESMSNAPKYIAEARKGSRFGHDTLVDGMLKDGLWDVYGDFAMGNCAELCADNHALTREDQDAYAIQSNERGIAARNSGAFAWEIVPIEVPVGRGKPPVLVDKDEGLDKFDPVKLKKLRPSFKENGGTVTAGNASSISDGAAALVLVSGQKAQELGLQVIARIKGFADAAQAPELFTTSPALAIPKALANAGLESSRVDYYEINEAFSAVALANQKLLGIPSEKINVHGGAVSLGHPLGCSGARILVTLLGVLREKGGKIGVAGVCNGGGGASALVLELA

SEQ ID NO: 55428 - protein, 1346 aa, Oryza sativa
MNNFHVYEAIGRGKHSTVYKGRKKKSIEYFAVKSVDKSQRSKVLNEVRMLHSLDHPNVLKFYSWYETSAHFWLILEYCVGGDLKGLLEQDKKLPENSIHDLAYDLVKALQFLHSQGIIYCDLKPSNVLLDESGCMKLCDFGLARRLKDIEKTNPGDVPQPLKGTPCYMAPELFQEGGVHSYASDFWALVCVLYECYSGRPPFVANEFTQLVKSIISDPTPPLPDNPSRSFQNLINCLLMKDPAERLQWSELCEHHFWRSRMSIIPLPPQPAFDNMVDLSATPYLVERNGDKPSRQSTPPKPRDGLRKKDENSAKVFTPVKNMLSGKKNNAKPSCKADGLKGVNILRMSRVAKRNLQREKDKENYRRHPTEASENDTEVKIENNDMELDFGENPEGDAPDDNDGSDNPGSAEDEKLSTQGTDGNEENCMSNQMDMLTDEGPVKAETMIKTEHNCSENLDVVATPPSICMRKAQRAKTTSGAAAGSEPSDISAAFWHPTDLAVKPVMPGRKGDKAVETVPMLPFEALPAVDYIKLPREQMNAFNSQILQSLSGTFQVSEKQNIIKYLEMLSINSDAANIITNGPIMLLLIKMLRLSKTSVLRVQIASLMGLLIRYSTILDIELASSGIFNALSDGLRDKHDKLRRFCMATLGELLFYISTQSDQDTKEINAQESPLKDNRATASWQVPSSVIALVSSILRKGEDDLAQLYALRTIDNICSQGTDWTSRFASQDVISHLCYIYRATGKQENTRLIAGSCLAHLARFSSSCIHLILERLAFKDIACTLIKGNSREQQISLNLLNSALVNSQIIPTMNRYIQSLTEEKQLVPGLISLIEQGTDVLRGKTLLFVALLCKNSRRWLPHFFCNAKLLSAVDRLGKEKEGFIHQCTEAFVQLVASLVPGILDTVSSDIQQVMGGKRHGAATALTGRAHPKSIIHLFPVILHLLGSVSFNHRVVTSHVLLQLANLMKILEAPFQARDDFQMTLLRVLEAATEEPSVILNEHKIFTSRILPSLSVLYKGNKDGDARFLCLKILSDVMIVIFSDSSLTSNEQTVSDLEKISQKYFLPMYPSFAEDEDPIPIYAQKLLVMLMEHDYVKVSDILNEATVSRCFEFLLGDLSNANVSNVKLCFALASAPDMDTDILSQLQVVRRIGNLLEFVTAKDMDDFLEPTLELCRAFIIRGIGSDKIVALSKEPALLVDSAFSMSIAVDQQSCVMDICDFGGNMGIFLDLVGSSDPHISDLASDCLVLLLKAAPREATVGLLTNLPKLSVVLDLLKHGTCLRLTRLLYCLAFSCRQYLAQGMIVSISLSALMRVEALVSAFKGSHDGCLADAASYLGAELQRLPRCG

SEQ ID NO: 55429 - protein, 694 aa, Oryza sativa
MSDSASMAAAIEARFSGRDLIGRGSFGDVYKGFDKELHKEVAIKVIDLEEAEDDIEDIQKEISVLSQCRCPYITDYYGSYLHQTKLWIVMEYMAGGSVADLLQTGPPLDELSIACILRDLLHAVEYLHSEGKIHRDIKAANILLTESGDVKVADFGVSAQLTKTMSRRKTFVGTPFWMAPEVIQNSDGYNEKADIWSLGITAIEMAKGEPPLADIHPMRVLFMIPRENPPQLDEHFSKPMKEFVSLCLKKNPAERLSAKDLLKHRFVRNARKSPKLLDRIRERPKFPVKSSADATQNGRTHVEEDDGTGTIKVERATRDVVSPSSQGTVRKAAGWNLPDRSEGTGTVRGGLKPSQVTSTKDSRSDASHSPNTPKRTADRENQWRTSWTGSEESISTNPSQRDAQSEYGRLESSTEDNDQSISGSGTVVLRSPRASQVYPAATNHSSKPPSRFSSYEDTSISGTVVRNQIEEPETPRSSRSRLGIQEKSPNASLEDSATNLAEAKAALQAAFKKGNARERHVISKHEKESHEPRISAVNSHDAPSENADMEKGRKPRQIHDGQSAPQASGSVSSPALSSLIIPSLKEATGDKFNGPVVHTFLDSLMHLEKELPGSCEVLIGRMLHRLGSSKESSLQSLQETATSVFAKKSEPPSEPPSNKKMANTPSLAAPTVSPLARFLLTRWQNQVSQDLNSV

SEQ ID NO: 55430 - protein, 217 aa, Oryza sativa; identical to SEQ ID NO: 31701

SEQ ID NO: 55431 - protein, 418 aa, Oryza sativa
MKYLCDRADPPIPCELVRGHLDYTPHAWNVVPVRKGNTWVRMIVDACYPTNIKEETDPEYFCRYVPLSRLQIILDDQGYTPRSPFPSVSLCKEIETTASSSVYYCKIGAVDAAAKVRYLDTRCASSDEVKNFEYKLLAEVRMLGALRKHQSIVEIYGHQLYSKWVQADDDKEYKILQSTIMMEHVKGGSLKGYLTKLLKEGKKHAPIDLAFYIVREVACALLELHKKLVIHRDIKSENVLVDLDLERSDGTPVVKLSDFDNAIPLHSLSHTCCIAHLGTYPPNVCVGTPCWMAPEVLRAMRDKNQYGLEVDIWSFGCFLLEMLTLRIPYQGLPDSEIYDLIMRKKQRPRLTQELEAFWTLDKPITRLELGITSDAHAEKLRLLIDLFYQCTKGIASERPKAEAVYNLLCSLPTCYDMR

SEQ ID NO: 55432 - protein, 183 aa, Oryza sativa
MELELGLRLALPSPSPSPATATAAGSELDLLNSAPGSCRKRGFEEALGGFKTDDDNDDGNGRGGDGDSDGEMGNKRRKLVGWPPVKCLHRRRDGGCGGGYVKVKMEGLAIGRKLDLSILGSYAELLDTLHLMFPSTNQEDGHDRRRRHPYAVTYEDGEGDWMQVGDVPWEAFAKSVKRLKILV

SEQ ID NO: 55433 - protein, 250 aa, Oryza sativa
MKSDTRRQDGNHGAYHYICNGALLMFQETACRLVKSVGDNLILDQILSNGVKATRKCKGKNSGNKVDDMCPKASSCEVGMTQDSDGQFRDVINAYLEPKCHSPDSEAVQRVCGQHPFLRPQLQKICEEYFDWSPEKTDQYILPKIAERELRRFSDLRSASSALGIKPLLSEIPVPCPVLAIVKQRKVHGNECYEVSWRNIEGLQVSVVPGDLVKSACPEKITEFLEKKGEEKKQKRRASKEIRAGCSERC

SEQ ID NO: 55434 - protein, 479 aa, Oryza sativa
MPARRAHMEDGICPVNKRRRLALSPCAEVYNSKRIISQWVDFQSLPEDILSRIMSKLTLKQAVQMSMVSSVFRRAWIFHPDLLFGTEELFGTSDRQLRALSTNGFIDTINFILRKHSGLGVSDFGVKFELWKEHARDIDGWVSFAIASKARVLVLNFSPYIGLRENSYSFPCHLFNDRNGSHFKVLQLDTVTFGPTPDFCGFANLTMLTLKHVLVLDNFQYFLPKCPALEWLEILMCSQLHNLHVSEPLPRLEFLRVQGCAINKIELHAPKLTTFEYRGCFKVIIALHKCLKLKTASIASHIEDNLEYVFTGLPNGLPHVERLHVKVFVRTQIPGFTQPPLKFINLRHLIMRITFGSAKRFGKNAVLQLAYLLEAAPLLVDLHLDMTCADICEDPPARDVIIHRPYYNLKRACMTGFNGNGGQIALVRFILRNAVKLEKMTIVPKGRRTGKMMGEYELSLRMIRKKIVPKDKNGVLVIL

SEQ ID NO: 55435 - protein, 251 aa, Oryza sativa; identical to SEQ ID NO: 51627

SEQ ID NO: 55436 - protein, 198 aa, Oryza sativa
MAVFRHLRFIFGNLPSDSSAVETTTKLATAVSTCVVRLELSGLSACLAAIVCSSLQPPLRPLGHAAGDGASFIIKSVLDRATELLTDQHVASTYSMQNRALWQASFDAFFGLLTEYCMSKFDSVIHALQTQPAVAAVISREMPVELLRASLPHTNEYQRKQLLSFSQRTVPVNNHSSHGSNNGPMTSESIPSSESRKI

SEQ ID NO: 55437 - protein, 417 aa, Oryza sativa
MAATDSRRLADLDDDELDRLLPLIKVTHFAAHRTSAPGGCGCPCAATRRMEEGQASSERTPNPPTVAQSSLDNSKKDSEKALRKRSIKMAMKIINYSEDCMRKIVELNATLPLDQHFFPACIWPRDLEDLRFSKIGFYVDYRLNDTSPTTWGCKRFAHEDKYVASTMLRINGLVFTGDFPHGRSMHVYGFVAVRDDKEPLRNYIFNVSREKACQLNLDSPSLEISPPMRGISIWDSALIEFHLKVKGSDSDSSSDDDILINACMEFDYETIEHDKKLISRIDGPFGPLDMRYIFLKNGIEATIDIDLGSTSEAYDILLVAFSGEDSMTLYKDRVGQHTKFTAVVIVPLDELLHIKAFGTYGSSHFDGNIAVPVLKHGSCKKPFWFQLAEKKSGHKNLPRACLEVTFSTMGYYNTGEM

SEQ ID NO: 55438 - protein, 206 aa, Oryza sativa
MASRGRGRGRGRRGGGYGFDHPAKHTPHEDFPDITLPEMTCARATMEEKALIQSTLKFEDFWKTSCYHLEEDVPKKKNDDKEIERYSDRKRKTHSKREALASYLILTPANFPVELVQGSKRGQPSSKKLRWDRSSDDQAFEVFEKLEEKHKDGDKKTEKDGDDEDEHEEEEVEEENSDDDYNQNIEFDDDDDDWNQEEEAHEDYYD

SEQ ID NO: 55439 - protein, 53 aa, Oryza sativa
MNKSLDSEEEDLLNRFDASTRFRRFFFFLNSVLGYLSLLVFWVLYILLVKLLG

SEQ ID NO: 55440 - protein, 543 aa, Oryza sativa
MRMKTLACCRRRPQDFSIDMDQEPDRVMTYNGLESCIINSSSYDDDSGLSATTGADGCVTTDSVDDEVSSCSSSKDVSSSSFSSQCHPLRKQEEHSLYELDTLSAVHLLPLKGKKPITYTLSASDIETMKEKFGKLLLGDDASGGARGVCAALALSNAIINLSATIFGELWKLEPLCEEKKVRWRKEMDWLLSPTTYMVELVPTKQNGADGCTFEIMTPKARSDVNVNLPALQKLDSMLIEVLDSMVDTEYWYVESGSRANGRGKKNGLRQTKKWWLPSPRVPDIGLSQFQRNRLVFQAKLVHQILKAAMSINEEVLLQIPIPPAVTDALPKSGRAGLGEDLYHAITTEYIPIEEIFLSLSLKTEHTVLETMNRLEGAVFAWNQRISEEKSKKSPGRHSWNFMKDSSSELDKMSMCIERVETLMQLLKSRFPSLPPTFIEVVKIQYNVDVGHAIVEAYSRVLVGVAFSILSRVAEILLEDDLIKKPNTPLATLKFDLSSDVYLAGITETPPGHIRRSLMDQISLVDGSLDAVVRKKGVKQLRW

SEQ ID NO: 55441 - protein, 179 aa, Oryza sativa
MKNTRKRKHRASAEGHANVCAAGRPKAAQHGTPKVWPAGGAARCWKINLPGDEGCDKIDATPSRTISSNIVQFFCLSLSLSTCIFQAFSTYMHGQSFNSHQSIHWRRLRRRQNTEGGRTRRHERSRWLPAGASDARRGYRRSPKRRRQAIDIRPAIPLPDEKNMHACVGDVHMRVLLLP

SEQ ID NO: 55442 - protein, 268 aa, Oryza sativa
MGKSKKNKGGRGGGGGGGEDQFDGGSDVDSVSSVSTALSDLQLAQATEQVSSQDFVLDKYIDDLYEKRGSTREAALGALVDAFESFVLLDLVENKYATLLSQFINSIKKGSIKEVCLACHTTGLLAITLGAGSSSHEIMDESRLQLLRVLQTWPDASKMISALDCLAVVTFVGATDLSETQLSMKAIWDVIHPKSGSNVGIVRKPKPPLLAAAVSAWALLLTTIVSSKRNVDSWKESITFLSALLEAEDRAVRMAAGEALALLRVKTA

SEQ ID NO: 55443 - protein, 783 aa, Oryza sativa
MAATAFTEEEKAVDDSLGYPKAYARLCRGGGGGGGGLPYGHGPPHGFLPYVLHPHEAMRAKDLNEMFPVADAEAAPTANPRGFANLLWKQLDHLGNAGFDPALFRVDAYGNVLYLHADSASPLAWDIDHWFPCARGGRTVPSNLRIVQAQVCRKKHNKLEFLVPWWDLQLGISVNQFLSIFASKNADFRNRAFTFLFVDGASEELTSMQAVEAHAFPHHFSDLTKKVGLAPAAIVSSRGSDSSVLKSLDANRPLRPNYPLIAAKKFTGEKDENFNVPMSNHGPNSTKENNNPDADGYISNPYLSIATARDSLRQREEAKKKQAELTELENEATELKQKNEEERVAIQDMEALLIKRRRRVEKCRRLAEAQSNYKAVLEKMIRDAMHQSVVYKEQLRMNQAATSTLMARLEAQRAMCDSSETELRRKYQQKDELEKQIKPFTDQARKRYRVDDDGLLEERHSLEERHSERVKYFPGIRLRSRNPLKQELRVFLEEDQRASDAYISLEEEEIAGETSTMGNFRNSPFKVINFPRRSMEDNTVDTERGRASVREKLEHLAIKERQRGRRRERTMSSRGSRATSTPVRSRDGNGKGKAAMVQCESETERSQTVSVPRTSSVPPSPPYRVTGVYGTPRYPAEKSVLLKKNNVIHRQGVGRSEGDANMNHTGKGTVDKWLQMLMEDQQQQEDPAAAYHSSEDHNTADEIASDEHQMQSRIDDESCRNEITECSDEIVEVGGDGATEQQDRCRNSFEIKERGEEKKIWFPRSDSSGVSGLCLPHLPRSLE

SEQ ID NO: 55444 - protein, 395 aa, Oryza sativa
MIHNLCTVLGMDFLSTVTEVHPSLDDSIGDNCKSISNDTLSKLDKTVATLNEDKKSRLSKLQELAGQLYDLWDLMDAPMQKRSMFDHVTCNRSASVDKVTAPGALALDLIEQAEVEVQRLDQLKYSKMKEIAFKKQTELEDIYAGAHMVIDTAAAHEKILALIEAGNIEPSELIADMESQISKAKEEALSRKEILDKVERWMSACEEVSWLEDYNRDDNRYNSSRGAHLNLKRAEKARILVNKIPALVETLVAKTRAWEESRGLSFMYDGVPLLAMLDEYVMLRQEREEDKKRMREQKRYIEQQLNTDHEGPFGSRVSPNRPVSAKKVPGAKSNGSANGTPPNRRLSVSGHQNGRSGGKDGKRDSAKTASPGNVAAAKEDASSHISGTDPVPSTP

SEQ ID NO: 55445 - protein, 65 aa, Oryza sativa
MSYPQKSVPVFFLNEKSRLIVLFVFVLFPLSQMTVMSALRLHPLLQSLGSITSKPWSQEQWSLGM

SEQ ID NO: 55446 - protein, 42 aa, Oryza sativa
MEEEREGGRRRGIVLIITMYVVVCEFYTECSEETDPRLTFGR

SEQ ID NO: 55447 - protein, 811 aa, Oryza sativa
MEILSPSPPPSPGPASASASASGSAMDSFIHRGAGWHFPRRDNVDARVHVAVGRSPEKTLGLLRWAFRRFACAQVVLVHVHQPSPLIPTLLGKIPAAQATEELVLSHRKSEKDEMNKILLTYLTFCHRAQVQASLLVTENEQIHDGIITLVKDHGITKLVMGSTPDTCFKLKASYGKASFMARNAPSFCEIWFVWRGRHIWTREAAAAIGNNISVYNEDDVMIRKRIRFSSTSNNAESILDEGYISYEAQTPADRYEITISDNGQPNDYESLVDANHFCNIIVPNLQNAQSAFNSTFQPGSSVDMESLVLYPQEILDKNFKQVILEAERSRKDAFVELLKRKDTESRVAGVIARAKASEFAQKQEMKMREELEALLTATKKQHEDLAENKEKATEGLDSSMRKLAILDARAKSIAFRMNEAVAELKLIQSSIGTLNQEIPKREKLELVHTDQVERCAYNHIMLPNCSSTVCADDLYNFRELTLSDIKAATCKFSDSLKVLPRGLGCVYKGEIMNRSVMIYKLHSCIIQSSMQFQQEVHLISKVRHPHLVTLIGACPDALCLDYEYVPNGSLHDRLWSKCGIPQLPWKIRARIVAEISSALFFLHSCKPQMIVHGDLKLENILLDANLHCKIADCGISQLFMEDAKDADPEYRRSKPLTPKSDIYSFGIVILQLLTGKQAAGLPSEVRRAMSSGKLWSLLDPTAGEWPLEVARRLAELGLKCSEAASPELLTPETVRDLEQLHLMRDNRQVPSFFLCPILKEVMHDPQVGADGLTYEGRAISELMDNGPPITPNHALRFAIHDWLSQRSTPF

SEQ ID NO: 55448 - protein, 469 aa, Oryza sativa
MPREIITIQVGQCGNQIGMEFWKQLCLEHGIGKDGLLEDFATQGGDRKDVFFYQADDQHYIPRALLVDLEPRVINGIQNSEYRNLYNHENIFVAEHGGGAGNNWASGYHQGEQVVDDIMDMIDREADGSDSLEGFVLCHSIAGGTGSGMGSYLLETLNDRYSKKLVQTYSVFPNQMETSDVVVQPYNSLLTLKRLTLNADCVVVLDNTALNRIAVERLHLANPTFAQTNSLVSTVMSASTTTLRYPGYMNNDLVGLLASLIPTPRCHFLMTGYTPLTVERQVNMIRKTTVLDVMRRLLQTKNIMVSSYARNKEASQAKYISILNIIQGEVDPTQVHESLQRIRERKLVNFIEWGPASIQVALSRKSPYVQTTHRVSGLMLANHTSIRHLFSKCLGQYEKLRKKQAFLDNYRKFPMFEDNDLSEFDESREIIESLVDEYKACESPDYIKWGMEDAGEANVAAALDSKLVV

SEQ ID NO: 55449 - protein, 67 aa, Oryza sativa
MDASVWCPLCSRAGIYLSFSSIWFSLLIYLSVNLPTFLTQFWNRKFYRLSKPIFWMNLSRINVLELI

SEQ ID NO: 55450 - protein, 261 aa, Oryza sativa
MAAGEGDVGMEVETKAPAMPPPPPASSSAARKKKQARAKNGDTPEPDAAGGARARASRRAKRGPGSYRGVRQRRWGKWVSEIREPNRGKRHWLGTFGSAVDAALAYDKAAASILGPRAVLNFPAFSPPAAAIAAPEQCEPPFCSPATTAAATAPEQRQTPGCSPAAVAGSGGGAVFEERDVKPVVLPLPLPAILQDGGGTEAMAQHWDWEWDASWPELEMFECLDDIAMYLDVDAVMTTRDCKVEELDADIVDSPLWTLSD

SEQ ID NO: 55451 - protein, 451 aa, Oryza sativa
MRECISIHIGQAGIQVGNACWELYCLEHGIQPDGQMPGDKTVGGGDDAFNTFFSETGAGKHVPRAVFVDLEPTVIDEVRTGDYRQLFHPEQLISGKEDAANNFARGHYTIGKEIVDLCLDRIRKLADNCTGLQGFLVFNAVGGGTGSGLGSLLLERLSVDYGKKSKLGFTVYPSPQVSTSVVEPYNSVLSTHSLLEHTDVAVLLDNEAIYDICRRSLDIERPTYTNLNRLVSQVISSLTASLRFDGALNVDVNEFQTNLVPYPRIHFMLSSYAPVISAEKAYHEQLSVAEITNSAFEPSSMMAKCDPRHGKYMACCLMYRGDVVPKDVNAAVATIKTKRTIQFVDWCPTGFKCGINYQPPSVVPGGDLAKVQRAVCMISNSTSVVEVFSRIDIKFDLMYSKRAFVHWYVGEGMEEGEFSEAREDLAALEKDYEEVGSEFDDGDEGDEGDEY

SEQ ID NO: 55452 - protein, 90 aa, Oryza sativa
MIATCSDVKSLPEVTIDEKKIVTYCLLVLFSFRNTKEIGDCWSWIHRFRDGSFWNGPGLRLVLSNLPLTLSHQWMDKLGSHSSICWRSRK

SEQ ID NO: 55453 - protein, 288 aa, Oryza sativa
MDMEKIAGADRDRAAETSSPPRPTKHRHSASFDGFAFGAGAGGPGPGLGKQQDGAGGVFSEVMEAKKAMSSEQLAELAAIDPKRAKRILANRQSAARSKERKARYITELERKVQTLQTEATTLSAQLTLFQRDTTGLSAENAELKIRLQAMEQQAQLRDALNDALKQEVERLKIATGEMAKSNDAYNTGMQQVPYSPSFFQLSDQHAVQHHAGVQQLLHQFQQPHPSVPSHQMLSHPNSLSDMMQQDSLGRLQGLDIGKGPVAVKNEAEVVVKSEGSSISAGESNSTF

SEQ ID NO: 55454 - protein, 214 aa, Oryza sativa
MTSTCTRRRTSRASPRTGAPRPRTRGGPSSRSPTPPASSASAATTAATSPPPTSPSSSASPAARSSRPSPTASTPPSSGSPSATAPTPASAPATATTSAPTAASRRGATPSPTTSPTATPGGSSGPSRSSRSSRNPSSRPHRLRRRPRRAALQDTFSRALSRADAGAGACFAAAAPSGEPTFVLSAATAAATGLHRATTGIHRATSTGAHPGEN

SEQ ID NO: 55455 - protein, 188 aa, Oryza sativa
MATSAYAATVAGEAAAAAASPSRRVLAGGRPPPPCISFLSKSPSWCASISLPPGPRRAAAAAEERVEEEEPTWVELEPIGSEQQLERALAEAQQLGLPIVLLWMASWCRKCIYLKPKLENLAAECYPRIRFYCVDVNAVPQKLVNRAGVTKMPSIQLWSDSQKQAEVIGGHKSWLVIDDVRRMIDQEE

SEQ ID NO: 55456 - protein, 134 aa, Oryza sativa
MSQVGSAGEGSNSMAAAPPPRLLLLVVLLLVPVSNAIYCEEDDCYDLLGVKQDANVSEIKKAYYKLSLKHHPDKNPDPESRKLFVKIANAYEILKDESTRGQYDYAIAHPEEVSTTLLSTIGHTMAIKRILVLC

SEQ ID NO: 55457 - protein, 491 aa, Oryza sativa
MAARRSRVAFVLVDGIGDVSIPSLRGRTPLEAAAAPGLDAVAAAGVAGLMDPVEPGLACGSDTAHLSLLGYDPRVYYRGRGAFESMGAGLAMAPGDIAFKSNFATLDESTGIIVSRRADRHFEEEGPILCAALDGLKLPSFPEYEVRVRYATEHRCGVVVKGPRLSGNISGTDPLKDNRLHLKAEPLDDSEEAKNTAAVVNELSKEITRILVSHPINAQRSAEGKNIANVVLLRGCGIRIEVPAFETKHGLAPCMVAPTKIIAGLGLSLGIDILEAPGATGDYRTLLTSKAKAIAKALSAPLDTPPRVFVPGEDEYKSGKENGYDFGFLHIKAIDDAGHDKAVKLKVLGLEAVDRAIVQLARLLWEAEKSGKYQYFLCVTGDHSTPVEYGDHSFEPVPFVLCRLRDFVGAMGEDNVINFPLDDFLLPSVKSGEDVAENIDVADRKSDQRKAFSGDSVFEFNEIAAARGCLGRFPGSEMMGIIKKFIKAKND

SEQ ID NO: 55458 - protein, 689 aa, Oryza sativa
MGLPQVNPAEEAPTPSSRPVSSPRSFEGVGACDLDGLLGGSSSSRVFEYPSIGDSDRKTALDIPNGSTEYSRDSHCFDRPAGLRGLRIDSRDADSRSSHKLDPTVHVPTMRVVGFESGSVGGSAIIETDNCHTPFDQHELQARKRLLSPLKNVLNRQFHGDILNISAGDARFELSDSARKLNISCFQDSKKANTGMLDSFEPQAWTNSRCSNGSPEWDANKINSNLFTDGPLLGSKESLAYLDHLAASAKLAHSPLSLSPLSPKFMNRTKATGAQCRTMRDIEHHFLDSREKGGPDGIRMLSVLEETNILHDEYNVMTPKRSSCRRYQIWGPESTPTSPRVGYGRSLSLPVRRSLVGSFEESLLSGRLSYGKDNQIIDGFLAVLNITGGNFSPPTQKLPFAVTSIDEDSSLLYYSSIDLAGRSSATNCRSPKLERSLSNNDSRSAKSRLRIPVKGRIQLVVSNPEKTPLHTFFCSYDLTDMPSGTKTFMRQKVTLSPTLSSSNPMKEGSNAGDINIGPKAESVSCGEVTERESSECSSDGSEEKDANAKRCSLDSNMMESNKHNSPVNKKNNTDSDDCCCQMDNLGGKNYCCASSRINDSSGGGVIRYALHLRFLCPSSKKSSKSMLRCKSDPSSVPYDSNAAKEDDRRFYLYNDLRVVFPQRHSDADEGELRVEHDFPADPKYFDISN

SEQ ID NO: 55459 - protein, 418 aa, Oryza sativa
MESGAGSLEARPGVLVVGAPGVGKRTILSRLLAAEIPDTHDLSSGVLCQGWNIDTKYYSADLSVWTAHLGQGFSLDSLPHLDQLDALVMVFDMSDESSFLTLQNWVSSVDVQRFEILLCIGNKADLVLGHGAHVEYRRRMQKIGESSTDPHPEYLDFGINESEGCGLLSEEEPQIEIRDSASHWCIEHNIEYVKACASNADFDKCLSVNGDSQGLERLLGALSAHMWPGMILKSGNRITVPSLVEKEESTDDESNYEFEYEVLSHGSDEQWEFIGESSTSRDLEGLNEDTATHDKTNQVVDADANSVASNPLPNGRMTETAEEKLVPQSHKSEVSNDMDNTQADASEKLQAGIPEGNKLFEDEHYGLDDLERLMSEIGNMRSNLRLMPDFQRKEMAAKLAMKMATMFGDNDEEGSEDI

SEQ ID NO: 55460 - protein, 191 aa, Oryza sativa; identical to SEQ ID NO: 36995

SEQ ID NO: 55461 - protein, 260 aa, Oryza sativa
MLDMGFEPEVRAILSQTASVRQTVMFSATWPPAVHQLAQEFMDPNPIKVVIGSEDLAANHDVMQIVEVLDDRSRDSRLVALLDKYHKAQRNRVLVFVLYKREATRVETMLQRRGWSAVSVHGDKAQHDRTKALSLFKEGSCPLMIATDVASRGLDIPDVEVVINYSYPLTTEDYVHRIGRTGRAGKKGVAHTFFTQENKGLAGELVNVLREAGQVVPPALTKFGTHVKKKESQIYGSHFKEIKADAPKSTKITFGDSDED

SEQ ID NO: 55462 - protein, 547 aa, Oryza sativa
MPSMRVTTDTWPRRAAQEPLLLLLLRSSLMKSASLQALNPNRAMAAMGRSVRVVLDSSVLLDPSGVTAEEEEVVVALRPGAEALLRRLRYSNLRVAICHPEGLPTNESGFLEKTAKLYSFGYMPLTSPSGSNLLNELMLEWSGTNFCFYVTSGVHEGLLSELQNHNWEVIAMGNEDVIKNSGVIHISMLQELLITLATSIKKEIGNSSAFVVGYVMKQSREEDFAKRGAFPIYPSKNDLIFVPLSFELPLASQLQEVDLVLHKITDEIINIDPNSSISFPKGISFSPGMSEIIRFVEEHCDFCVIDPFKNIYPLLDRIQIQEILIRLEGLSAEGRPKLRAPCFLKIESFCGSELQKQLAEAKLSFPLIVKPQVACGVADAHNMALIFKIEEFSNLSVPLPAILQEYIDHGSKIFKFYAIGDKIFHAIKNSMPNASHLKSSSGGKPLTFNSLKTLPVATKEQLLQNEVQDSKLLDINLVEEAAKLLKELLGLTIFGFDVVVQESSGDHVIVDLNYLPSFKEVPDNVAMPAFWDAIKQSYESRKQMTQT

SEQ ID NO: 55463 - protein, 652 aa, Oryza sativa
MMQKKNHVSNAVFFDISRCISIIPLEVDGRAKRRDKHYAVSVLARTLFSPSSAKSKDVVLSGGFKASRNATGSARATLDALHKTYMTRKERHINIVPFKFDTPSPDDVVATGLKSSRSFRKVDTDAPHVTEKRVMDNDSSTPEKDTTADSNLPVKSNEFGESSESVSVGSQNETLCLDHELQHLSLERKSQKSKANIKKPVSSSLYKPEPWMLQHEDEGIPRQLNLAIVGHVDSGKSTLCGRLLHALGRISKKQMHKYEKEAKEKGKGSFAYAWAMDESADERERGITMTVGVAYFDTKNYHVVLLDSPGHKDFVPNMISGATQSDAAILVIDASIGSFEAGMGINGIGQTKEHSQLVRSFGVDNLIVVVNKMDSVEYSKERFNFIKSQLGAFLRSCGYKDSAVAWVPISAMENENLMTTASDTRLSSWYDGNCLLKAIDTLPPPSRDVSKPLRLPICDVFSSHKLGQVAIGGKVEVGATRSGSKILVMPFGELAVVKTIERNSSSCNLARAGDNVAIGLQGIDPSHIMPGGVICHPGYPVSVASCLELKILVLDITVPILVGLQFELHIHHAKVSASMVKILSLLEQKTGKASKKIPRFLTSRQTAVIEVKLEKEVCVEEFSNLKALGRVFLRSQGNTIAVGIVSRVREQA

SEQ ID NO: 55464 - protein, 531 aa, Oryza sativa
MWHEARKSERKVHDLMDAARRRAQRRAAYLARRRGDPHQSLQVSGARCRVHRDDALYQATEDQQGLIPWNGKQDVLIDRFDGRALLDFIRDSSSRPFRVQEKSEEEEELEEFVNFERYRDLIKHRRRGFSDEAGLQHVSQELEAKAILPFSFEKPQSSQTPASKGTYSQVGYSYKGDGNEESEDLKSDEEDEEEEDEEDEKGFSSDDSSDERMESIAKEFGVKRYNWLVYMDKKAKEEEKRQKEIIKGDPSIKKLSRRERRKVSQIEREREREAARSVGRVSYRDPYREQRRSPSYDSYSRGRRSRSRSRSRSPSYSRRHGRGTHAESNYRSKPKTPRVEYITEFGGSDDTSDLKVAGISPPSSPIRVGIPNRSSGGQILEALHSDPASSLSVEQEKSTKNLKAPTSTSALVKLSKGATGGPGKTVRTEKKETPQERLKRIMSKQLNKQIRKDTAAEIAKKREQERQRQEKLAEVGRYRGRSRSLSRSPPRRRHYSRSRSRSRSPRRYHSRSQSHSRSPSRSPRYRSRSRH

SEQ ID NO: 55465 - protein, 216 aa, Oryza sativa; identical to SEQ ID NO: 33341

SEQ ID NO: 55466 - protein, 418 aa, Oryza sativa
METNPNLDLDGEGGAGAGASSGRSLLPKGSGRFRRSSARCSLPKGSDRFRRSLSPVNSRSLLEGRDVRDAVFPNKLFDKAFGQPLPAPVTPSLVPSPAYIVRPNLPTPSEPHGLNFNAPLVGDGKMQMDVEGAPLVGDGKMHMVVESTPLVGDGKMHMVVEEEMTTALAVHQPSSQRSQRIIVIEMMADVGSPSSPGSPYSPSSPSSHRDAPSVRFSSRGIRNHKMPQCDIDRSDTEEDLYSSCEEDPYFNSLVDDFIGVVTSTDLLASSPEIDYMAANQSQSLFYAESALKHYNNNDENKIKYELISAITSNAIIDRSGYGHVNFVAKGDLPDSVDEFFFAEVRWDIDSYVPVCMVSLEGKEKSGGYRDIEVDYPRGGFVGVPVDKNHCYACGDGLKHPEDGTLYESGHIASGSYYD

SEQ ID NO: 55467 - protein, 241 aa, Oryza sativa
MASSARDLSGDPPESTRLRIGDDIAWSDVGGVYDRDDSLKENTNPKCILKNHLPGAHNGGSQRFSGNLKPTAAPIIGISGKLGQGGKNRHHPSAMFPKKVAVTGGGGRNPKAAVPEHEPTSPKVSCIGKVLSDRERARRGRRPAGRMVPAGGCCPGLGGLFRRSHSRKKNAVECVDQSPPPLPPWASRRGEPKEVKEATPAAAAAMAPGLGGMMRFASGRRAADWATEMEPDGRVARSGPL

SEQ ID NO: 55468 - protein, 413 aa, Oryza sativa
MCRCAAAIARAVVEFLDAVLVGFFLSFFGPHPRDRDRDDSPGSGRRDSLAHKDRLGELLSDDDELGLGGRGGSHEDLADDCGSDEELRSEANFLKLCGTLFETPAELHNISYQINMESYIEHDKIPTNVLAVEATPAFESKSSGGFEYGEDHILTPQLNTEDTEHLPLVKSVYQSAIRGNSPFQNIKSINDGSSDSPFHTPLVLRDDMQTPRTVYTSHKGSSGKRVRTRKQFAYPIFRPTENKLQKMQLSDSAKMTQQISSDSVVKGESLNSSHFPLEVSKYQLDRQRLLDAGERSKSNSDENIEVCSLSRWLKSSPAGNTNQMYDENNLIEEGHAFMTSEDNVDVDNHTPRLSKARDCHCIPNTSRKYGEDQHVSWHSTPFEERLIKVLSDEEVPPTRKLVPGRLLYLEERV

SEQ ID NO: 55469 - protein, 142 aa, Oryza sativa
MSAPDTDPILGGALSICCWCCAAAAVDTFMVPSGPYLRGRPRFLLTGSMGVADGGTVGEPAPAEAETEAMLLCINGGGGGAASIWNCMPASGPGPMDWRIAVGLIPMLGMGRMTDGPPCIPASGDALCPPPPHPPPSIRCCC

SEQ ID NO: 55470 - protein, 284 aa, Oryza sativa; identical to SEQ ID NO: 28809

SEQ ID NO: 55471 - protein, 384 aa, Oryza sativa
MAEAAVRCLRDGRLDGEHAPALAVASNIQCGPLAAGAMLHLAAAVASNAAAGKAQARGLVIVAFDRSPEVYLDFMRRRGLDPNALNRCVRILDCYSDPIGWNQKIRSQQQQESGADLCSANKENVTIFRNVKDLDKLMCSTIDLGRGFAGEGKIYFSIAVDSISSMLRRASVSSISSFLSNLRSHDQISSIFWLIHSDLHEPKFSRAFECLSTMVASLEPAVVDSVYEEEIPGNISFLEENYSKAKFYLRLKRRNGRVKHLYEELHVEGNDVRFVSAPSVSTEVSQSLLPKVQFNLELSEKECSDKANVVLPFEHQGKGEPINIYDGRRSLPEAQQDSNLTASALLDEVKFPKSAAPKGEIHYFRDSDDEQPDSDEDPDDDLDI

SEQ ID NO: 55472 - protein, 209 aa, Oryza sativa
MEEPASADPPRIFWKSRRRSASANGRSLQQELNKEAADEQLNNQAHEEAMKIDDANAVSTDDDVHPDPKANLSEKRKALFEPLEPINGKRSSAEMLLPPPDFEPASYPKGWLVGKKRKLVNVDVVESMRRIAIQEMNRKDREINGLNEQLEEPRVLELLQKQLADERKKRTEIEKENSMLHEQVSMLMNMLDENEAFDEEGEAPPPDTL

SEQ ID NO: 55473 - protein, 197 aa, Oryza sativa
MATPASEPAGAGTPEPAAPFSADWKERILLPAAVAGVVGAGFGLLSRHRARLGAARATATYAANLAIVAGCYGGARELARDARASTPDDPMNSVVGGLASGAVLGRLQGGHFGAVKYAVTFAAAGTALDYAALKLSPQINGKWHALKEHFSGDKDWFTLPEWSPIQVLDEEALAKKRAREEKLFAQRALSKLSKEEP

SEQ ID NO: 55474 - protein, 64 aa, Oryza sativa
MIFFLGVDYQDSDTRKGNRRTRGCERGSKTLGSSADLSKYYDDKPCHDYNGYRLQNSIMIYHYG

SEQ ID NO: 55475 - protein, 460 aa, Oryza sativa
MADATAALSARSKVQAFLEAARAGDLDSLKKLAAALDEEGKGVAAVAAAVKDANKRTALHFAAREGRTHVCHFLISDLALPVDPKDDDGETPLIHATRQAHLQTVTYLLHHGADPSVASSLGATPLHHAAGIGNLDLMKLFLSKGVDVESESDAGTPLIWAAGHGQQEAVKLLLQHDAKPNTENDDGITPLLSAVAAGSLPCLDILIQAGAHPNIRAGGATPLHIAADGGNMEIINCLLKAGSDPNACDDDGLKPIQVAALRNNREVVELLLPLTSPIPGVSSWSIDGIIEYTKSVEEKAQVKEATTQKADRLQVPQLVEVSSEAKERSLEAKSRGDDAFRNKDYLVAVDAYTQAIELNPNDATLHSNRSLCWLRAGQAERALEDARACRALRPDWAKACYREGAALRLLQRFEEAANAFYEGVQLEPENGELVSAFREAVEAGRKFHGTDKKQKADAST

SEQ ID NO: 55476 - protein, 386 aa, Oryza sativa
MDFKGFWESRFGGKKEQEPEQNGHANGVANGSVRKRTSDLAVYEQFEQQARQTEVRAAAIRDGNADAIQKPLLPSFESAEMRNLAETLLRDIIRGSPDVKWGSIKGLENAKRLLKEAVVMPIKYPKYFTGLLSPWKGILLFGPPGTGKTMLAKAVATECKTTFFNISASSIVSKWRGDSEKLVKVLFELARHHAPSTIFLDEIDAIISQRGEARSEHEASRRLKTELLIQMDGLTKTNDLVFVLAATNLPWELDAAMLRRLEKRILVPLPEAEARHAMFEELLPSTTSKLEVPYDTLVEKTEGYSGSDIRLVCKEAAMQPLRRLMSVLEARDELVPEEELPEVGPLKPEDIEVALRNTRPSAHLHAHRYEKFNQDYGSQILSQEQA

SEQ ID NO: 55477 - protein, 853 aa, Oryza sativa; identical to SEQ ID NO: 51854

SEQ ID NO: 55478 - protein, 810 aa, Oryza sativa
MATLPDLGVSAFINILGAFVFLLIFAALRLQPINDRVYFPKLYLTGQRRHHPHPHGFVNLDLCSYLRFLAWVPGALRMSQPDLIHHAGLDSAVYLRIYTLGLKIFLPIMTVALLVLIPVNVSGGTLLNLRKEIVFSDIDKLSISNVNPGSNRFFIHLLMAYVFTFWTCFMLYKEYSNVAFMRLHFLASQKRCADQFTVIVRNIPHVSSHSTSETVDEFFRRNHPDHYLGQQAVYNANRYAKLVKKKERLQNWLDYYQLKFERHPGKRPIGRTGCLGFCGREVDQIDYYRARISELDKKLASERQRVLNDPKAVMPVAFVTFDSRWGAAVCAQTQQSKNPTQWLTDWAPEPRDVYWQNLAIPFFSLSIRKFLISIAVFALVFFYMIPIAFVQSLANLEGIEKVAPFLRPVIDTPVVKSFLQGFLPGLALKIFLYILPTVLMIMSKVEGYVSLSSLERRAASKYYYFMLVNVFLGSIIAGTAFEQLNAFFHQPPSQIPRTIGVAIPMKATFFMTYIMVDGWAGIANEILRVKPLVIYHLKNMFIVKTERDRERAMDPGSIGLAENLPSLQLYFLLGLVYAVVTPILLPFIIIFFAFAFLVYRHQIINVYNQEYESAAAFWPQVHSRIIASLLISHVTLFGLMSTMKAAYSTPLLIFLPLLTIWFHKYCKSRFEPAFRKYPLEEAMEKDNLERTSEPNLNLKSYLQNAYLHPIFHMFEQQQQQEQEQQREEKVEVRIDKAQQHHHRQVEEEEEESKSSQATTHYYHHHHEQTTTTTHHHYHQHEHMSHYHMGPSDTADSPSPPHFVYHYGVDP

SEQ ID NO: 55479 - protein, 572 aa, Oryza sativa
MARRSSSSSSSSGAWRYLNPAYYLKRPKRLALLFFVFVAATFAFWDRQSLVREYESEISRLDDKVNQLRDQLRKAGVHLDENPTGDKVSREKLVEIDPINNERREKVKEAMAHAWNSYVKYAWGMDELQPQSKNGVNSFGGLGATLVDSLDTLYIMGLKDEFQRARDWVADSLSFDKDYDASVFETTIRVVGGLLSAYDLSGDKVFLEKAKDITDRLLPAWDTPSGIPYNRINLAHGRAHNPGWTNGDSILADSGTEQLEFIALSQRTGDPKYQQKAENVIRQLQKIYPSDGLLPIYINPHSGTASYSTITFGAMGDSFYEYLLKVWVQGNKTEHVKHYRQMWETSMEGLLSLTKKTTPSNYYYICEKNGGSLSDKMDELACFAPGMLALGASGYEETEKAEEIMNLAKELARTCYNFYQTTPTKLAGENYFFHTGQDMNVGTSWNILRPETVESLMYLWRLTGNKTYQDWGWDIFQAFEKNSRIESGYVGLRDVNTGEKDNMIQSFFLAETLKYLYLLFSPPSVISFDEWVFNTEAHPLRIVPLNDNSKAHSVGIATPTVRPFGRKQGKQE

SEQ ID NO: 55480 - protein, 195 aa, Oryza sativa
MLGTTAAQPTSRRGGLSTPRTRHGFGCGVDKMNRLRLAIPSASKNVSRCGKLAICRAQSEDSKGGGGFLTGFLIGGAIFGTLGYVFAPQISKTLDSLLDENGQDSESDEHGLVKPRYGRYYDEGLEKTRQTLGDKISQLTLAIDKAASRLKRVAGNVEKEAINDESEIEISSFNDNELVAENLNEQGFVQGETAT

SEQ ID NO: 55481 - protein, 487 aa, Oryza sativa
MKNNLVKNNMLKEFYIPTYIFVPESPVEKVSQIPSCPVIVFINTKSGGQLGHDLIVTYRKLLNNSQVFDLLEEAPDKVLHKLYGNMERLMRDGDTVAAEIHRRLRLIVAGGDGTAGWLLGVVSDLKLVHPPPVATVPLGTGNNLPYSFGWGKRNPGTDEKSVLSFLQSVRQAKEMKIDSWHIVMKMESPKSSTCDPIAPLDLPHSLHAFHRVPNNPQDKEYSCTFRGGFWNYFSMGMDAQVSYAFHSERKLHPEKFKNQLSNQKTYLKLACTQGWFCASLCHPMSRNIAHLSKVKIMKKSGKWETLEIPQSIRSIVCLNLPSFSGGLNPWGTPSERKQRKRDLVMPPLVDDGLLEIVGFKDAWHGLVLLSPKGHGTRLAQAHRVQFKFHKGATDHAYMRLDGEPWNQPLQKDDGKVLVEISHAGQVKMLATKNCIAKGIHEALSMSTVHPESSSSSDDTDDDDDFAEERKNFGAALSFRYMDDVTKE

SEQ ID NO: 55482 - protein, 128 aa, Oryza sativa
MDELENLRKLHPDVAIIYADYYGAAMEIFLSPEQFGIENPLVACCGGGGPYGVSETARCGNGEYKVCDDPQLYGSWDGFHPSEAVYKAIATGLIWGSYTQPPIATTTISCLQITELSSSVEYKVLYDL

SEQ ID NO: 55483 - protein, 640 aa, Oryza sativa
MTDGHHFNNISLGGRGGNNPGQFKLYSGGLAWKRQGGGKTIEVEKSDITSVTWMAIPRSYQLGVSTKEGLFYRFFGFREQDISSLTNFMEKNMRITPEEKQLSVGGHNWGGIEINGNMLSFNVGSKEAFEVSLADVAQTQMQGKKDVVLEFHVDDTTGGNEKDSLMDLSFHVPTSNTQFPGDENRPSAQVLWQAILNKADVGSSEEAVVTFDGIAILTPRGRYSVELHLSFLRLQGQANDFKIQYSSILRLFVLPKSNNPHTFVVITLDPPIRKGQTLYPHIVIQFETEAVVQRDLTLSDEVLAEKYKDRLENSYQGLIHEVFSKVLRGLSGAKVTRPSTFRSCQDGYAVKSSLKAEDGLLYPLEKGFFFLPKPPTLILHEEIEYVEFERHGAGGASISSHYFDLLVKLKNDQEHLFRNIQRNEYHNLFNFISGKHLKILNLGEAQGRAGGVTAVLQSTDDDAVDPHLERIRNQTGDDESDEEDEDFVADKDDSGSPTDDSGEEGSDASLSGGEKEKSSKKEASSSKAPLKKRKPKGGDAAEGSEKRKPKKKKDPNAPKRAIAPFMYFSKAERANLKNSNPELATTEIAKKLGERWQKMTAEEKQPYVEQSQVDKKRYAEESAAYRGAAAMDVDSGPASD

SEQ ID NO: 55484 - protein, 808 aa, Oryza sativa
MLPGSKRDAHLPLPIYPQIAAANGFATAEEFDPLLFLSPDAVCGGGGGDYLNIVSAQPISAASTNGASPPRDVSVSASAASSAAAQHDDSEAFSDIVLGYINRMLMAEDIDEKFEHYPVNADDLLAAEKPFLEILADQSPYSGGSSVESPDGSSAANSCNNLSPCNCSSSSDGLGAVPQTPVLEFPTAAFSQTPQLYGDLIPTGGMVESGGAWPYDPTEFYQLQTKPVRENLPSQSSSFASSNGSSVTFSEGFESLLSPAGVLPDVSLNDFVVQNQQALQFRRGFQEASKFLPDESKLVIDVDKLYSGDEGSRFLGEVRQEKKLVKVKTETSDVESAGHRGKKHFYGDDLDAEEGRCSKHSAQGIDTDHLVRDLMDKVLLCNGETCSKGVKEMREALQHDVAKHSGGGHGKGSSHGKGRGKKQPKKEVVDLETLLIHCAQSVATDDRRSATELLKQIRQHAHANGDGDQRLAHCFANGLEARLAGTGSQIYKNYTITRLPCTDVLKAYQLYLAACPFKKISHYFANQTILNAVEKAKKVQIVDYGIYYGFQWPCLIQRLSNRPGGPPKLRITGIDTPQPGFRPAERTEETGRYLSDYAQTFNVPFEFQAIASRFEAVRMEDLHIEEDEVLIVNCMFKFKNLMDESVVAESPRNMALKTIRKMNPHVFIHGVVNGSYNAPFFVTRFREALFHYSAIFDMLETNIPKDNEQRLLIESALFSREAINVISCEGLERMERPETYKQWQVRNQRVGFKQLPLNQDMMKRAREKVRCYHKDFIIDEDNRWLLQGWKGRILFALSTWKPDNRSSS

SEQ ID NO: 55485 - protein, 382 aa, Oryza sativa
MDEAEAAAAAAKMDELAGGGGGGGGDWSYLAADALAAASFTAFPFHHHHHHHHRDVLSASTPSSLLLNMDAATAAAMFDFQAAFPSSSVPPPPPTTTAALPPFHDFASSNPFDDAPPPFLAPPGQKLGFLGPPGGAFGGGMGWDDDDEIEQSVDASSMGVSASLENPAPVAVLRRRRRWWAAVGGARRRGCRPRTSWAERRRRKKLNDRLYMLRSVVPKISKMDRASILGDAIEYLKELLQRINDLHNELESAPSSSLTGPSSASFHPSTPTLQTFPGRVKEELCPTSFPSPSGQQATVEVRMREGHAVNIHMFCARRPGILMSTLRALDSLGLGIEQAVISCFNGFAMDVFRAEQCRDGPGLGPEEIKTVLLHSAGLQNAM

SEQ ID NO: 55486 - protein, 585 aa, Oryza sativa
MADTKAEAKAETIGGGGGGSGSFSEQAFVEKLNKLNNTATRIQTLSNWCIFHRKRARKVVDTWEKQYNSANKDKKVSFLYLSNDILQNSKRKGGEFVNEFWRVLPGLLKDFYVNGGEDGKKVVGRLIDIWDERKVFGTRIESLKNDILGGSTHTMGNNVNSSNPSPNPSSVSKAARKDSGTVTRKLTVGGMPEKIVTAHQSVLDQHFDEDTALNKCNNAVSVLDRMDKDVDDACTQGIQQGSSLISDLQGQETVLKQCIEQLESVNMARITLINKLRKALGEQEAKSELLRNQLLVARAKAEHAMQLKQRLGSALNNGAGSSSSPLMVTLPPGQTAAMMQNSAAMPIFPQFQPLHPATSLPATSSAVGDEPKKTAAAMADKLASLSAPEKVLSSIFSSLAAEQARNSGSTSGDLSAGPPGFESNKKPRLDNPIHASDMSAPPFFGQLPQVQPQIGATAALGGTQPPTQANQAAGSFPPPPPPLPLMPQFVQNTGGMFGMGPFGMVSGSAPPPPPLPNIMSAGFPRLSVPPPLPLPTQSQNQSQPQQQQSPQAPQQSPTSTGFFQPPGAGFFPPVQVQQSPSAQRQ

SEQ ID NO: 55487 - protein, 557 aa, Oryza sativa
MSPAKHSNHQKGTTSHEGNQEKRKDVAHDTNAQKKSGIPGNFSYPDPEFFDFDRCRDVSMFAVDQIWALYDDRDGMPRYYARIRRIDTTNFRVQFTWLEHDAKNEEEDKWTDEELPVACGNFFLGKTVVSQDALMFSHIVSWVKGRKRSSYEIYPRKGEVWALYKGWSMQWSSDADKHRAYEYEAVEILSNFTVEAGAAVGPLVKIKGFVSLFAKVKEKPSFVIPPSEMLRFSHSIPFFRTKGDEKVGVAGGFLELDTASLPSNLDVAFPSVTLDSCMPVCQTMNSGFNDFTGYEQGALKENLMNEGKRKDHSLERTPVHQQSAAYSSPSTFDYPNSEFHNFEEYRSYSKFERGQIWALYSDLDQFPKYYGWVTKVDTDPFRVHLTWLEVCPQLEQENMWLEQNIPVSCGTFKIRNWRIKLDTNDAFSHLVETSQVGWKRYFEIHPQVGEIWAIYNNWAPGWVPSSKDTFEYTIGEITDCTEASTKVLLLTRVDGYRAVFKPDSVRGTLEIPTNENIRFSHLIPSFRLTKENGGKLCGFYELDPASVPDTFLFRSGR

SEQ ID NO: 55488 - protein, 228 aa, Oryza sativa
MILLILVKQISQICLQEWMVELQRQESTPLSRKEILEKVEKWTLASEEESWLDEYEKDQNRYNAGRGAHKNLKHAEKARMLVSKIPSLLENLTAKIKAWEKENGVPFMYDKIRLLDSLEEYTSRRQQKDEEKRRSRELKKLQEQYAAEQGATFGTKPSPARPPSARKPLGQSSNANIISGTPTSRRVCTPMARKGGLSSGKVKETGKTAFIPANYVALPKDCSDNSNL

SEQ ID NO: 55489 - protein, 433 aa, Oryza sativa
MAAIDLSSPARSSPAPLSPRRGSLHLLLRRPRRPTLRCSLDAAPKQAQAQGPPAAVAAEEAPTARKECYGVFCTTYDLRADEKTKSWKSLVNVAVSGAAGMISNHLLFKLASGEVFGPGQPIALKLLGSERSIQALEGVAMELEDSLYPLLREVSIGIDPYVVFEDAEWALLIGAKPRGPGMERSALLDINGQIFAEQGKALNSVASRNVKVIVVGNPCNTNALICLKNAPNIPAKNFHALTRLDENRAKCQLALKAGVFYDKVSNMTIWGNHSTTQVPDFLNAKINGRPVKEVIKDTKWLEDEFTKTVQKRGGVLIQKWGRSSAASTAVSIVDAIRSLVNPTPEGDWFSTGVYTTGNPYGIAEDIVFSMPCRSKGDGDYELVKDVAMDDFLWERIKKSEAELLAEKRCVAHLTGEGNAFCDLPGDTMLPGEM

SEQ ID NO: 55490 - protein, 200 aa, Oryza sativa
MDSVQKYGHNGTQGASVSPQCDNNPNNRNYGVRPTWNSRRGLRGNFVPPIRSNGGSTSNMTSRVIGKNDDSMGDSTRKCLEMLCGPDGELPEKLRNLEPRLIEHVSNEIMDKDPNVRWDDIAGLEHAKKCVTEMVIWPLLRPDIFHGCRSPGRGLLLFGPPVGIYLIWLCCSSPILFNLKISALISTGNRQNHDWKSNSW

SEQ ID NO: 55491 - protein, 480 aa, Oryza sativa
MASMAALLVVVFLAGCHVGVVVAQGRSTAAAHGIGVNYGRVADDIPPPARSVELLRAVGAGSVKIYDANSSVLRALAGTRMRVSIMVPNEIIPGLAASAAAADRWVAENLVPYYPETRVKYLLVGNELLSDYSIANSTWPRIVPAMENLHVSLRRRRISSVKISTTLAMDALTSGSFPRPPSAAAFRPDIAGDVVRPLLRFLNGTNSYYFVDAYPYFVWAGNNDTVPLEYALFQGGGGGGRYVDPGTGLTYTNMLDEMLDAVVHAMAKLGYGGVKLGIAETGWPNGGDYEQIGCNAHNAAIYNRNLAARMARSPGTPARPGAKMPVFVFSLYNEDLKPGPGTERHWGLYYANGTAVYPVDLAGARPLRSYPLLPPPENDAPYKGPVWCVLAGRRGEKLNETAVSDALAYACGQGNGTCDAIQPGGECFRPNTTAAHASYAFNSYWQQLRKTGATCYFNNLAEETTKDPSHGSCKFHSSLD

SEQ ID NO: 55492 - protein, 923 aa, Oryza sativa
MAGGSSPAIRPIGKSAVHRICSGQVIFDLSSAVKELVENSLDAGATTVEVTLRSYGEDSFTVADNGTGISPTNFQALALKHHTSKISDFGDLASVATFGFRGEALSSLCALGKLTVETRTKDEPVGTRLEFAHSGVVTGERKMARPVGTAVTVEKLFSTLPVRSKEFSRNIRKEYGKVISLLNAYALIAKGVRLVCTNTVGKNSKSAVLRTQGSSSLKDNIITVFGLNTFKCLQPFNVTISEGCQVDGFLSKPGPGSGRNSGDRQFFYVNGRPVDMPKVSKLVNELYRSSNAKQYPVAVLNFCIPTTSYDVNVAPDKRKIFFSSEHAILLSLREGIENLYCPQQCSFSINSVEDPGKEMDPAIDGSDEDMCLTEKENVSAPENDDDMDETDSDDEVTPENQKVPSSVTTRVATGSTPKDVSPLSRGPPAQLDRSTLLSAYRYEQREKTPTRVKSYPAQANHVRTGLAAKSSPSSAVQPSIMKFLSQNKRKHEDSCNLISEAPVLRRGTCLEQVRRTDLGVNSPTALTSRVSNIPEVNAPQGTNPLRHHSLQSFVPEMPEDSPQHSEPPNIVSHRDEVPQLRPCDVHATESEVDNQHDPCHSKFGAPSRCSEVEPQNKLTNISLPDAHYDGHDTAAHSGQSSYPVMQFTLADLRRRRRHSFMISHAKKGSFPEKSTRCYKAATLDNYVPDNEEGKSNSLAAATSELDKLFSKDDFGEMEVVGQFNLGFIIGKLDQDLFIVDQHAADEKYNFENLSQSTTLNIQPLLQPLRLDLSPEEEVIVSMNMSTIRKNGFVLAEDLHASPCNRYFIKAVPFSKNITFGAQDVKELISMLAGSQGDCSIISSYKLDRTDSICPSRVRAMLASRACRMSTMIGDPLTKTEMKKILKNLTGLRSPWNCPHGRPTMRHLADLHAIKTEGSKATFS

SEQ ID NO: 55493 - protein, 889 aa, Oryza sativa
MAASVEYKLAPHPWASNAPSSNLDLFPSGGGKRRSGSETDSDDEDSIPPDWRSLYHPRLEVAEPAVKDPRDEATSDAWVRRHPALVRLTGKHPFNSEPPLPRLMSHGFITPAPLHYVRNHGAVPKADWSTWAVEVTGLVKRPARLNMEQLVTGFEAVELPVTLVCAGNRRKEQNMVRQTVGFNWGPGAISTSVWRGVRLRDVLRWCGVMGASAGAANVCFEGAEDLPGGGGCKYGTSLRREVAMDPAHDVILAYMQNGEPLTPDHGFPVRVIVPGFIGGRMVKWLRRIIVASSESESYYHYRDNRVLPSHVDAELANAEAWWYKPEYMINELNINSVITTPGHDEVLPINALTTQRPYTMKGYAYSGGGRKVTRVEVTLDGGETWQVCNLDHPERPTKYGKYWCWCFWSVDVEVLELLAAKEIAVRAWDESLNTQPEKLIWNLMGMMNNCWFRVKTKTCRPHKGEIGLVFEHPTQPGNQAGGWMARQKHLETSESAVSTLKRSTSTPFLNTATTQYTMSEVRRHTTPESAWIIVHGHVYDCTGFLKDHPGGADSIMINAGTDCTEEFDAIHSDKARGLLEMYRIGELIVTGSDYSPQSSSADLTSIVESPTAAAAPAVPVSTVALSNPREKVKCRLMDKKSLSYNVRLFRFALPSPDQKLGLPVGKHVYVCASIGGKLCMRAYTPTSSVDEVGYIELLIKIYFKGEDPKFPDGGLMSQYLDYLPLGATIDIKGPIGHIEYAGRGAFTVNGERRFARRLAMVAGGTGITPVYQVIQAVLWDQPDDGTEMHVVYANRTEDDMLLREEIDRWAAAHPARLKVWYVVSKVARPEDGWEYGVGRVDERTLREHLPPGDGETLALVCGPPAMVECTVRPGLEKMGYDLDKSCLVF

SEQ ID NO: 55494 - protein, 840 aa, Oryza sativa
MAAAVAMRSGSGSDGGGGGYDKAGMDSGKYVRYTPEQVEALERVYAECPKPSSSRRQQLLRDCPILANIEPKQIKVWFQNRRCRDKQRKEASRLQAVNRKLTAMNKLLMEENERLQKQVSQLVHENAYMKQQLQNPSLGNDTSCESNVTTLQNPLRDASNPSGLLTIAEETLTEFLSKATGTAVDWVPMPGMKPGPDSFGIVAVSHGCRGVAARACGLVNLEPTKIVEILKDRPSWFRDCRSLEVFTMFPAGNGGTIELVYMQMYAPTTLVPARDFWTLRYTTTMEDGSLVVCERSLSGSGGGPSTASAQQFVRAEMLTSGYLVRPCEGGGSIVHIVDHLDLEAWSVPEVLRPLYESSRVVAQKMTTAALRHIRQIAQETSGEVVYALGRQPAVLRTFSQRLSRGFNDAISGFNDDGWSVMGGDGIEDVIIACNARKVRNTSTSANAFVTPGGVICAKASMLLQSVPPAVLVRFLREHRSEWADYNFDAYSASSLKTSSCSLPGLRPMRFSGSQIIMPLAHTVENEEILEVVRLEGQALTHDDGLMSRDIHLLQLCTGIDEKSMGSCFQLVSAPIDELFPDDAQLISSGFRVIPLNMKTDGTPAGRTLDLASSLEVGSTAQPTGDASMDDCNLRSVLTIAFQFPYEMHLQDSVATMARQYVRSIVSSVQRVSMAISPSRSGLNAGQKIISGFPEAPTLARWICQSYQFHLGVELLRQADDAGEALLKMLWDYEDAILCCSFKEKPVFTFANEMGLNMLETSLVALQDLSLDKIFDEAGRKALYNEIPKLMEQGYVYLPGGVCLSGMGRHVSFEQAVAWKVLGEDNNVHCLAFCFVNWSFV

SEQ ID NO: 55495 - protein, 510 aa, Oryza sativa
MEYERIEKPFPTQGGGFSPKRLRAMLLGVEKRRKGQEEEEEGDAGEVDDEYGAVPKSSVRSDADSDARRGGSMCEEYKDVDVVSTISESSSSLETGSGHRSRDTHSMGSRVRVPEEDSCDSESVASNFEFHKERGASARSVTAAIVPPFSKPAPSKWDDAQKWIASPTTNRPGRAGGVPQRKMEKTSFGGGRLPATKVVLEATEEIDTKRVDPSQEKREIGWQKAVNWAPPDPYPEVETCAKSALAEEITVADSAVTFSRHDSSATLQSATTCIPPPPTVRSVSMRDMGTEMTPIASQEPSRTGTPVRATSPDCSRPTTPRKTIGPNAIGAVIGHGECSNVELSEQELQMKTRREIMLLGTQLGKTNIAAWASNKEEEKDASLSLKGVPMDQSTQKVTEIRAAAWEEAEKAKYLARFKREEIKIQAWEDHQRAKIEAEMRKIEVDVERMRARAQDKLMSQLASARHTADEKRAAAELKRSRAAAKTAEQADHIRRTGRMPSSIGCWNWCS

SEQ ID NO: 55496 - protein, 209 aa, Oryza sativa; identical to SEQ ID NO: 30332

SEQ ID NO: 55497 - protein, 224 aa, Oryza sativa; identical to SEQ ID NO: 35307

SEQ ID NO: 55498 - protein, 350 aa, Oryza sativa; identical to SEQ ID NO: 30275

SEQ ID NO: 55499 - protein, 793 aa, Oryza sativa
MALKRTVWRKKIQMQLIWTGKKGLFSRRNTMSVIPMSLERQSPLSSLIYPSSTEKKTARRLTAEEKELAELVHRVHLLCLLARGRVIDKACNDPLIQASILSVLPQHVLRNSVDTPILKANELRSLVSWFHNTFSVIAQSDDKGSFKSNLAFALQSYVGTAEEVCALSVALFRALNLTARFVANLDVAGLKPDTKSMGTSNQDEPRLCTKALPSSSFVAGHNEYNNLSPVLSQNNTEGSINTTPKQVKVQGCRKSLSKKLSKCKANQRDSSASLSKDSSSSSQYPSTSSNAEVPRRKGDLEFELQLEMALLASAAKSQDNKLATQLNQSTDSLLSSTPPLKKLRKSEEASSNSSVVWSRNRAPLFWAEVFCGGEASSGRWVHVDVANDIIDGEQKVEAASAVCRKPLRYVVAFAGNGAKDVTRRYCLQWHRIVQGRVNPEWWKSVLAPLERLELAATNNTEEMELQTRALTEPLPTNQQAYKDHHLYALEKWLHKNQVLHPKGPVLGFCKGNPVYPRSCVQTLQSRHGWLREGLQVRENELPAKVVTRPKRTFNSQSIQSNSNSNEDGLKPTMELYGKWQLEPLQLPHAVNGIVPKNERGQVDVWSEKCLPPGTVHLRLPRIFQVAKRLGIDFAPAMVGFDYRNTRCLPVFDGIVVCSEFKNTILEAYAEQEERRQAEERKQEEAQALIRWYQLLCSVVTTQRLKDSYKAPSSEHGPEGPSQDVSQQKGTRKSRSSETKTRSSRLQADRPFDSPFPVHDHEHEYPEEDQSFDEETFVRTKRCPCGFSIQVEEL

SEQ ID NO: 55500 - protein, 321 aa, Oryza sativa; identical to SEQ ID NO: 31889

SEQ ID NO: 55501 - protein, 642 aa, Oryza sativa
MESLALLHAKPGGLPPRAGLRLPLPRARSARVSLPSSPAAPVSLQSPLLLASRSGPTSRDAVVGLGLGCGLLRRRSGASGGGGGGVSCGAQPAAAAAAGAVPAAQPEGKKFLGVEVKTLKKIVPLGLMFFCILFNYTILRDTKDVLVVTAKGSSAEIIPFLKTWVNLPMAIGFMLLYTKLSNVLSREALFYTVIFPFIAFFGAFAFVLYPLRNVIHPTALADKLLAALGPSFLGPVAILRIWSFCLFYVMAELWGSVVISVLFWGFANQITTVEEAKEFYPLFGLGANIALIFSGRTVKYFSNLRKTLGPGIDGWEVSLKGMMSLVVLLGLVITSIYWGVNKFVLNDPSLPKSDRKKKKDKPKLGMKESLKVLLSSRYVRDLATLVVAYGISINLVEVTWKSKLKAQFPSPNEYSSFMGDFSTATGIATFTMMLLGRIILRKFGWGVAAMITPTVLLLTGVSFFSLILFGQPLTPMLATMGMTPLLAAVYVGALQNIFSKSAKYSLFDPCKEMAYIPLDEDMKVKGKAAIDVVCNPLGKSGGALIQQFMILTFGSLANSTPYLGGILLVIVLAWLGAASSLDKQFSSLAKEDLKRDMSAKEKVDPSLLKAPEADVLVEHTNGTIESEATATESSPSNSSPSN

SEQ ID NO: 55502 - protein, 276 aa, Oryza sativa
MEGGDSVLDAVLDEEALDYDGDDVEMADADDAVEEAQAQEDPVAITAPTAAATGGGGGGGEGDGGVGQAGKNKNKKKKKRKKSARTKNKGKPDGPPKIADINRFVNETCKRLKEKKSYLVWNAVGCLGVSAISDLVREVEAIQKCGGQIVADGSRFRTGGGILWNILKSREPKAYKEIMAKGRELEKQFRYKQGRPQTSRNEDASSQGSALIDEDIEPHGEKEVSDDPERLIDAEKSPHVPDNNKAERKPLADRIRVLVAYDDLFEEGEIHEGDAP

SEQ ID NO: 55503 - protein, 356 aa, Oryza sativa; identical to SEQ ID NO: 29602

SEQ ID NO: 55504 - protein, 563 aa, Oryza sativa
MGSQNRPPPPRKRQPPPPEDHLVTYKRRRSKETQPLPLMANGANSKKDAKAQHWISWRDTLHGFLQSPAISQGGGIQTCIRHALQHNPCLLTNGVVVHTEFKGNPAHSQGEEAKVQHPNGAAGGKVVSADAAIQDAAAAASSEANKAMCNNALFDILVSQKFALLCHLLLGTFHVNKPGDVIDLEKIDAKMRNGDYAHNPALFDDDIQQMWEKFEQVGQEMTGLASNLSTISRVSYQKQASGFSEAEVAEHRIEEISLPGAVHVVTKESTTTVQLAPCDSSHSTIPKRTVPPGRDLCPCDGCGTKVDVEEGLICDECDTMYHFACVKLLNPDIKQVPAIWHCSTCSFKKKELAADTTNNVAHDCLHGGNCVLCDQLELVKTEEEDPKLPIKIELAEEREGSSVSSMGEDNEPDLSTTALSNLCKHCGTCEDDDKRFMVCGHPYCVYKFYHIRCLKTSQLAIEQQKKLGCWYCPSCLCRGCFQDKDDDQIVMCDGCDEGYHIYCMRPARNTIPKGKWYCTFCKIRRAAEGMHKYEDSVLKIHGNSKHACNVNQSKDSEGDGTEK

SEQ ID NO: 55505 - protein, 221 aa, Oryza sativa
MEVLLPLLLACSLLFTIATPIRDITDVCASQISDFQHLNSSGLHLTLHHPQSPCSPAPLPSDLPFSAVVTHDDARIAHLASRLANNHPTSPSSSSLLHGHRKKKAGGVGGSQASSSSVPLTPGASVAVGNYVTRLGLGTPATSYVMVVDTGSSLTWLQCSPCSVSCHRQAGPVFDPRASGTYAAVQCSSSECGELQAATLNPSACSVSNVCIYQASYGDSS

SEQ ID NO: 55506 - protein, 566 aa, Oryza sativa
MAEVAATQHGHAVAARAMPGRGEVDTSSPFESVRQAVDLFGGGALSPWRHHHPPPPPPPPPLQLRPEEVELMKVEEQTVKLEMELFVKEKETFKVLKELQATKQVADNLKLQLEKAASESAASARGHSDAGKVYPLPDTERKCSYHTGQPVESAKGNQSALTTLIKLNQAKAFLNMDTVMTIKRQIEEEKGSLEKTRERLQLNRAKASSLEADLNKIVSQLQAARGPKPTLEPSDIWLQMKQLNSEKEKHRKIADDSKNEIGELTATIEHTKSRTKTLQFRIVMAEKLKEASRRGEALALAERKNLSNGEHEASTASDVTLSVEEHSVLVQKAEEADAACRKKIDAAMQELDQANRGKLELLERVEEAMAAVETSRKALEEALKREESTNKAKLVAEESLRKLRSEQIIQNWRPTGNSSVKFKTSAATTAAVVAHRRAGSGIYDVNGLSLVTATPKSTKAMSIGQILSMKLDHRELEVAGKGGGAKKKVSLGQILSQKYDALSPLRIDHGGASRRQFHPRRRKLGFVVYALLLAKHRHRKKRQPAAAAAADSSSCTHGSFSTKAVY

SEQ ID NO: 55507 - protein, 687 aa, Oryza sativa
MDAYEATKVVFSRIQALDPDHAAKIMGLLLIQDHGDKEMIRLAFGPEALLHSVMAQARKELALLPPPPPPSSSSPTVPAAHSPFLLSRQNSGRGPAPSPSPLSASSPSSWAQAQPFSRSNGSVDEVVGAGEELISPANSGGGAAANAPPFFPRGGDVLLDDFQLQEQLAFLNEGGVNPSHPLQGFDGAECRSPGPGEGGGMFPYGLGWANGGPGHRRSASVNELCLGGGSSDGFGWKPCLYYARGFCKNGSSCRFVHGDDAAALTGAAMDAATAEQQQCQDFLLRSKSQRLGPAAFPYSPTGSLPGSPSAATKCLSLLLQQQHNDNQRAAAAAALMLGGSDEAHKFMGRPRLDRVDFASMMNPGSRQIYLTFPADSTFREEDVSNYFSIYGPVHDVRIPYQQKRMFGFVTFVYPETVKLILAKGNPHFICDARVLVKPYKEKGKVPDKYRKHQGDFSGCTTPTGLDGRDPFDLHQLGARMLQHSNSTNEMMLRRKLEEQQQAAELQQAIELHSRRLMDLQLLDLKNRAAAAVTTAMAMTIPTANAFGSSQPLATTMVESPPDSGEQLKGTGYFTEERKMVNGGGDKEESAGEASLNADSDQSLEHNLPDSPFASPTKSSVSAHQSFTTTDTGVVATSSCSASHVGISAGTNAGGGINHLRPSTLDIPSPRDFFSVSRLASDHGAIGM

SEQ ID NO: 55508 - protein, 272 aa, Oryza sativa; identical to SEQ ID NO: 30601

SEQ ID NO: 55509 - protein, 540 aa, Oryza sativa
MLMATVSPARREPTPQAVRASPMPSAAAALVRRGGGGSGGTVLGKYELGRVLGQGSFAKVYQARHLETDECVAIKVLDKEKAVKGGMVHLVKREINVLRRVRHPNIVQLFEVMASKTKIYFVMEYVRGGELFSRVSKGRLREDTARRYFQQLVSAVDFCHARGVFHGDLKPENLLVDENGDLKVSDFGLAAGPDQFDPDGLLHTFCGTPAYVAPEVLRRRGYDGAKADIWSCGVILFALMAGYLPFHDHNIMVLYRKIYNGEFRCPRWFSKDFTRLITRLLDANPKTRITVPEIIESDWLKKGYKPVKFYIEDDKLYNLSDDVLNLEPADPVPPPLGLAPPVPPPPQGDDPDGSGSESDSSVVSCPATLSTGESQRVRGSLPRPASLNAFDIISFSKGFNLSGLFEERGNEIRFVSGEPMSDIVKKLEEIAKVKSFTVRRKDWRVSIEGTREGVKGPLTIGAEIFELTPSLVVVEVKRKAGDNEEYEDFCNMELKPGMQHLVHQMLPAPNGTPVSEKVERSSSLQAPLTLKLIGTEGSMS

SEQ ID NO: 55510 - protein, 248 aa, Oryza sativa; identical to SEQ ID NO: 30407

SEQ ID NO: 55511 - protein, 380 aa, Oryza sativa
MLRAVARCCGHWPPGAAAADGMLWQTELRPHAAGEFSMAAAQANLAMEDQAQVLASPAATLVGVYDGHGGADASRFLRSRLFPHVQRFEKEQGGMSTEVIRRAFGAAEEEFLQQVRQAWRQRPKMAAVGSCCLLGAISGDTLYVANLGDSRAVLGRRVVGGGVAVAERLTDEHNAASEEVRRELTALNPDDAQIVVHARGAWRVKGIIQVSRTIGDVYLKKQEYSMDPVFRNVGPPIPLKRPALSAEPSIQVRKLKPNDLFLIFASDGLWEHLSDDAAVQIVFKNPRTGIANRLVKAALKEATRKREVSFRDLKTIEKGVRRHFHDDISVIVVYLDRHRGRRHTRVVDSSSNCTNAPVDIYSSNSGQSVETLQAHRGSGW

SEQ ID NO: 55512 - protein, 353 aa, Oryza sativa
MAYGVALWSLATFLSPWAAARSLWLFLSTRVLLGMAEGVALPSMNNMVLRWFPRTERSSAVGIAMAGFQLGNTIGLLLSPIIMSRAGIFGPFVIFGLFGFLWVLVWISAISGTPGENAQISAHELDYITRGQKLVKTQSGGERLRKVPPFSKLLSKWPTWALISANAMHSWGYFVILSWMPVYFKTIYHVNLREAAWFSALPWVMMAVLGYVAGVVSDRLIQNGTSITLTRKIMQTIGFVGPGVALLGLNAAKSPVIASAWLTIAVGLKSFGHSGFLVNLQEIAPQYAGVLHGMSNTAGTFAAILGTVGAGFFVDRMGSFRGFLILTSLLYFSSTLFWDIFATGERVDFDGTG

SEQ ID NO: 55513 - protein, 633 aa, Oryza sativa
MGTEPSQTPTPPPPPPPASPRRRAPQPATILSPSFSRNPLRATAASASASAGPVPSPSSSSDCEEHPCVELFDWWLKRVEGDDRKVRIAGHTERNHKPHLFTSAPIVKRHKACMLEAEDSIIVLIDGPLDLSQMENNGYSLEVCEKFMTGFPCLWESYNLGSQQSCSYTSISRDGRTKFYWERFQIGNFIDKVGSSFLANLLNNSRSSSGNDADSFEKGSYLSNKKPRFEEYTCDLDISAKEKTTAFNEGSTGSLAVCNKVGNQQIDLVVKSFSKERGHGNIDLSASLTSIEETTRDKTSEDAGNQNEFIHSDAEYQEAGSHLVNSDSIYGMSTESGNQNEFIHADAEHQEVGSHVVNSDSNFDMSTDNMICEMGDGSANAGSAVSQGSKEVLATVLPERANLSPDSCLDNILPISTCNSNNCLENQGFPEIAQHMTLNEEVVPNEDISTSVHSDVESLGNPVGPAEVQRSECDILQGAPRSPKQNVGSAQEQRPEQSMSQGAARSPMIRTPIPDGAPSLRNQHLGSAQEQRSEHFMLKGATRSPMIRTPIPYGHYSPLTRGKAKSSSVSTPESLKLRRTRSGRVVVPTLDPGCQRIVYDRDGLVSGVAGLEFESPPLKGNESRTPESKRRVR

SEQ ID NO: 55514 - protein, 198 aa, Oryza sativa
MPANRSTTGGPRRTACSTTPLPLVLRCSACCRGCCCCVWRPGGCPVPVAGTGTGTGEIYTRVRGWGGWRSIFSAAGVGTGWSHPTGAAPLPSLTMSDGHIVQVRYGDTGAGLGRRSGWSWRSHPGCSEVAPAHVVHRPSTMVQVRHRVRPRAQLLVPPLSLASTGQVHPLSPQTTPTMREKRKGEKMAKREGNRLTDM

SEQ ID NO: 55515 - protein, 54 aa, Oryza sativa
MLFLLLRLLLQHPGFPLLFLMLPLVNLAETSWVLTMSESEVSVIYFGLYKLLNS

SEQ ID NO: 55516 - protein, 122 aa, Oryza sativa
MPPPAWGWGSNPLEPVVHTVAAFSRRLLIAPDAAPDEARLRPLLSLSLSPPPTPPSPPPPPPEVLKKDSKAAPLTKEEVGRATWMLLHTIAAQFPDEPTRQQRRDARELVSIKQDKQLVISL

SEQ ID NO: 55517 - protein, 90 aa, Oryza sativa
MEQAVTKENLADTSFCHQIKLTAELKSYIKEIADCLEESNKFYVVRMNRTFMEQDRVYFATEFSKKYIVNLVRGKTANIRVQIAGRPSTT

SEQ ID NO: 55518 - protein, 364 aa, Oryza sativa
MEDDDECPPLAVELSPEKPYSPPPLGPSAASPVGVTVITGYLGAGKSTLVNYILSAQHGKRIAVILNEFGEEIGVERAMINEGQGGALVEEWVELANGCVCCTVKHSLVQALEQLVQRKERMDHILLETTGLADPAPLVSILWLDDQLESSIKLDSIITVIDAKNFRLQIDEHNKSSSFPEAFHQIAFADVVILNKIDLVEGSLEDLERQIHEVNALVTVVQSVRCQVDLNKIFDQQAYGAKNSSQLQELLEYSKSVPPNLRHDNSISTLCICEQDPISLSKVESWLEDLLWERKLDMDIYRCKGILHVHNSDQVHTLQAVREVYEVLPAREWSKTESRTNKIVVIGRNLDINILQDSFSRCKH

SEQ ID NO: 55519 - protein, 632 aa, Oryza sativa
MGAVNGVCYGVLGDILPPRSEVVQLLKSQGIGAMRIYYPDKEALDALRGSGIAIIVDVGDSGAVANLASNPSAAGDWVRDNVEAYWPSVIIRYITVGNELPAGDMGLILPAMQNVHKALVSAGLSSSIKVSTAIKMDVVANTFPPSHGVFRPDVQQFMAPIARFLANTVSPLLVNVYPYVSYRENPRDISLNYATFQPGTTVRDSDSGLTYTNLFNAMVDAVYAALEKAGTPNVRIAVSETGWPSAGGFAATAENAMNHNQGVIDNVKNGTPKRPGPLETYVFAMFNENQQTGDETRRHFGLFNPDKTPAYPITPYPRPAVQSIGVCYGMVGNDLPSRSEVVQMYVSLGINRMRIYNPDREALDALRNSGIDLILDAGGFDTVSYLAASSSNAASWVHDNISPYYPAVNIKYIAVGNEVVGGTTESILPAMRNVNSALAAAGIGGIKVSTAVKSDVIANSYPPSAGVFAYPYMNGIAQYLASTGAPLLANVYPYFAYAGNPREISLNYATFQPGTTVRDDGNGLTYTNLFDAMVDCIYAALEKADAGNVRVVVSESGWPSAEGIGASMDNARAYNQGLIDHVGRGTPKRPGQMEAYIFSMFNENQKTGAATERHFGLFYPNKSPVYQIAFSN

SEQ ID NO: 55520 - protein, 330 aa, Oryza sativa
MEEHKHQELPQLRSDTSLELGCDARGYSRAGNDIAIWYCVIVAGRPGIELSKRRQILRKAQDQLFSDVDASTSENVDSSVVVSSAAAALKDDRLTFVWLDGEVQKKLCAFYLATDYSGACGPGGFGDDNDKSELFIVRFQRNATFEALKAEKTNNLMEALQRQHTADASQLVARYKGPDEIEEINKWISQIIKDGDTREIPYFTSKVPDLVPEETSKEWIKSTKSIRSAGNSVKQRIQSSGFHFGDYLTDPRIGPALLMSACISMGIIWYKSNQRTQTTEDGAPPKDKTKKRRPRPKLSTSLFGQPEYPADADPEPKDARQWEMTDSDSD

SEQ ID NO: 55521 - protein, 488 aa, Oryza sativa
MIARSRHAASLAAAACGGTSSAARSYAGLDLLLQENFSAPRRVLQLHALLLTSGALSLPHPDPAATAAFPYNCLIHAHLRLRGSASPPWGPLRIFSAMLARGVRPNRHTFPSLLKSSASFDAATPTLHAQCLRRGLDEDRFVACSLLSAYGRDGHLVRDARKVFDDMASPDLATCNAMLDVLCLSGDMYGARCLFDRMVVRDVVSWTTIISGLTRIGCHWDAVEMFRAFLLQNKGRLSEATLVSVLSACANLDAVEGLAVGMAVHGHVVRHEVQFTAFLGTALIDMYGKYGKLSCCSHIFHLVRDKEVCTWNALLSALANHGKEAEALVKFEMMRSEGFLPNHITFVAVMTACARAGLVETGLDFFEELFTEYKVIPMMVHYGCVVDLLGRAGRFLEAIQIIERMPFMADDSVWGALLGACKIHGNIELSAQIREKLIVLGGQQPGRYVTVRNMYLEEGNWYAATRMGEVMQEAGIKKIVGMSSVVLN

SEQ ID NO: 55522 - protein, 398 aa, Oryza sativa
MDPNTFFSMFIWKIPAKGHCIQRGGGEVRRVFCPYARQADPAGPCKARNNLCKLEREGFIESSPAQDCDLCCKMPDFCRECCCVFCRRVVDYSFGGYSYIKCEAVLEENKICGHIGHLDCALRTFMAGTVGGCIDLDMQYCCRRCDNKTNLMLHVEKFLEICQSLQSRDDIEPILNTGLCLVRGSRQTRAKSLESIMRSAMAKLKCGVDLAEVWKMEDNGINSTPSAEVSPATGGVTVLGIQQAPEEDAPPGFPYYVDLADNDLQRAVENLPAYITEDQHTLSVRFEDSIDHALKELKRSQEAEYKLAEQKLYSQKDHVLSLYRQLDSERSVLADPMPLADDDGSLYSTLITNVMKRVDQVKSEEEKLKVMLGIADGFGKTPSGVIQEHFGLPADTAN

SEQ ID NO: 55523 - protein, 87 aa, Oryza sativa
MAAEGGDLVHVRRAGHRAGRLLHVQGGQQCPPQLQEASHRRRPPPGRPNRPADRQLLQGWITERIQPGPGKFCRVVSDHCRPFWEQQ

SEQ ID NO: 55524 - protein, 716 aa, Oryza sativa
MASVDPSRSFVRDVKRVIIKVGTAVVSRQDGRLALGRVGALCEQVKELNSLGYEVILVTSGAVGVGRQRLRYRKLVNSSFADLQKPQMELDGKACAAVGQSGLMALYDMLFNQLDVSSSQLLVTDSDFENPKFREQLTETVESLLDLKVIPIFNENDAISTRKAPYEDSSGIFWDNDSLAGLLALELKADLLILLSDVDGLYSGPPSEPSSKIIHTYIKEKHQQEITFGDKSRVGRGGMTAKVKAAVLASNSGTPVVITSGFENRSILKVLHGEKIGTLFHKNANLWESSKDVSTREMAVAARDCSRHLQNLSSEERKKILLDVADALEANEDLIRSENEADVAAAQVAGYEKPLVARLTIKPGKIASLAKSIRTLANMEDPINQILKKTEVADDLVLEKTSCPLGVLLIVFESRPDALVQIASLAIRSGNGLLLKGGKEAIRSNTILHKVITDAIPRNVGEKLIGLVTTRDEIADLLKLDDVIDLVIPRGSNKLVSQIKASTKIPVLGHADGICHVYIDKSADMDMAKHIVMDAKIDYPAACNAMETLLVHKDLMKSPGLDDILVALKTEGVNIYGGPIAHKALGFPKAVSFHHEYSSMACTVEFVDDVQSAIDHIHRYGSAHTDCIVTTDDKVAETFLRRVDSAAVFHNASTRFSDGARFGLGAEVGISTGRIHARGPVGVEGLLTTRWILRGRGQVVNGDKDVVYTHKSLPLQ

SEQ ID NO: 55525 - protein, 178 aa, Oryza sativa
MHDDKFFMSNIKLQEMIELFLHRAMLELDQILRANEINFAILAALPAFGVSLLLLFAVRAWATHGRGAEGRGRTARRQRRLLLADVEKRLMEFQNCMANGMEEEACCKFGLTLYTLDRLYKAVESQARETGEWSSLKEDMFDLAKPGVGMEDKLVLLSRLKGMYDCLLPSPSGVLPRL

SEQ ID NO: 55526 - protein, 180 aa, Oryza sativa; identical to SEQ ID NO: 29288

SEQ ID NO: 55527 - protein, 610 aa, Oryza sativa
MMMAQKTKEAEITEQDSLLLTRNLLRIAIYNISYIRGLFPEKYFNDKSVPALEMKIKKLMPMDTESRRLIDWMEKGVYDALQKKYLKTLLFCICEKEEGPMIEEYAFSFSYPNTSGDEVAMNLSRTGSKKNSATFKSNAAEVTPDQMRSSACKMIRTLVSLMRTLDQMPEERTILMKLLYYDDVTPEDYEPPFFKCCADNEAINIWNKNPLKMEVGNVNSKHLVLALKVKSVLDPCDDNNVNSEDDNMSLDNESDQDNDFSDTEVRPSEAERYIVAPNDGTCKGQNGTISEDDTQDPVHEEELTAQVREWICSRDTESLEVSDVLVNFPDISMEMVEDIMERLLKDGLLSRAKKDSYSVNKIADPTTPHIKKEVIMQNVSPTEGTKNSNGDLMYMKALYHALPMDYVSVGKLHGKLDGEASQNMVRKLIEKMVQDGYVKNSANRRLGKAVIHSEVTNRKLLEIKKILEVDIAEQMAIDTNAEPGEPERKDHLSGHEMRDGSTMGCLQSVGSDLTRTRELPEPQQNVSMQSGQEASTVDKDPSRTPTSVREQASVCSLESGVLGQKVRKSLAGAGGTQCSQDKRFRKASTVKEPILQYVKRQKSQVQVQVQ

SEQ ID NO: 55528 - protein, 47 aa, Oryza sativa
MEERVKIGGDGEEEEEEEAEEEEAPLEVVRAAKRRFGVVVVVGPPPS

SEQ ID NO: 55529 - protein, 147 aa, Oryza sativa
MAPAGLLASRRPRLVRVAGGAAQDSGDSDRQIRAASTRSGGVAAGCGDGNGDGRGAAGSTAVGMATAAGFLTSHRPRLVRAAGGAAKDSCDSDRQIRAASAGSGGVAASDGDGDGDGRGPAGSTATGMATAPDPAALKAHPASRRWI

SEQ ID NO: 55530 - protein, 673 aa, Oryza sativa
MGPVLLCLAIAAATAVCAASSGAPPSPDAAAVAVGSCPTYSGSGYSSASDGGNQEEYDPNKENPCKRSCGSMSIPFPFALLSACSGSKRFLLNCTSNKTLIGIPPAQYQVINISLDDGVLFVNKPSNLGDIITTPTVANELHDFDFSGSQGIWRWAVANQTCHTARTDQLSYACVSNNSLCVHRSTGYHCKCSLGYGGNAYIEDGCEDIDECSLPNFCNGNCQNFLGSYRCSHCPRGSIFDPAKRVCIYGHGLHPAGLLIGLSCGIGVLFLVVGLILFVRRWRRHMQRKIRREYFQKNKGLLLEQLMSSDENVAHDPKIFSLEELEKATDNFHSTRILGCGGHGTVYKGILLDQRVVAIKKSRIVEQNEIDQFINEVAILSQIVHRNVVKLFGCCLVSKVPLLVYEFISNGTLYDLLHGEQSTTFSLTWEDSIRISLEVASALSYLHSAASIPIFHRDVKSANILLNDNYTSKVSDFGASRSISIDETRVVTIVQGTFGYLDPEYFHTCQLTEKSDVYSFGVILVEILTRKKPIIVNCFGENQNLGHCFLQTLQHGTIMEIVDPQIAKEANESEINEMASLAEICLRIRGEERPKMKEVELRLQLLRAMITERSRQELLRNNGIGPSVQSNSSTTSVTRSVVLRAGIGISTDQDATRCYTMEQELVSWTDLPR

SEQ ID NO: 55531 - protein, 740 aa, Oryza sativa
MAGAVLVAIAASIGNLLQGWDNATIAGAVLYIKKEFNLQSEPLIEGLIVAMSLIGATIITTFSGAVADSFGRRPMLIASAVLYFVSGLVMLWAPNVYVLLLARLIDGFGIGLAVTLVPLYISETAPTDIRGLLNTLPQFSGSGGMFLSYCMVFGMSLMPQPDWRIMLGVLSIPSLIYFALTIFYLPESPRWLVSKGRMAEAKRVLQGLRGREDVSGEMALLVEGLGVGKDTKIEEYIIGPDDELADEGLAPDPEKIKLYGPEEGLSWVARPVHGQSALGSALGLISRHGSMVSQGKPLVDPVVTLFGSVHEKMPEIMGSMRSTLFPNFGSMFSVAEQQQAKGDWDAESQREGEDYGSDHGGDDIEDSLQSPLISRQATSVEGKEIAAPHGSIMGAVGRSSSLMQGGEAVSSMGIGGGWQLAWKWTEREGADGEKEGGFQRIYLHEEGVTGDRRGSILSLPGGDVPPGGEFVQAAALVSQPALYSKELMKQRLAGPAMVHPSQAVAKGPKWADLFEPGVKHALFVGIGIQILQQFAGINGVLYYTPQILEQAGVGVLLANIGLSSSSASILISGLTTLLTLPSIGIAMRLMDMSGRRFLLLATIPILIVALAILILVNILDVGTMVHASLSTVSVILYFCFFVMGFGPIPNILCAEIFPTTVRGICIAICALTFWIGDIIVTYTLPVMLNAIGLAGVFGIYAVVCILAFLFVFMKVPETKGMPLEVITEFFSVGAKQAKED

SEQ ID NO: 55532 - protein, 178 aa, Oryza sativa
MYLLSPRNGDEEDEQEEIQELISDDEPPNLKLASCATAASSSSSSGSDMEKGRGKACGGGSTAPPPPPPSSSGKSGGGGGSNIREAAASGGGGGVWGKYFSVESLLLLVCVTASLVILPLVLPPLPPPPSMLMLVPVAMLVLLLALAFMPTTTSSSSSAGGGGGGGRNGATTGHAPYL

SEQ ID NO: 55533 - protein, 278 aa, Oryza sativa; identical to SEQ ID NO: 29983

SEQ ID NO: 55534 - protein, 748 aa, Oryza sativa
MECNKGEALRAKEIAERKFESKDLQGAKKFALKAQALFPGLEGIVQMITTLDLYLASEVLISGEKDWYSILSVESSADDETLKKQYRKLVLQLHPDKNKSVGAEGAFKVVQEAWTVLSDKTKRALYDQKRKLMVLKRNTSQTNKASAAPGASNGFYNFAANAAASKVTRGNKQKAGPATSSVRQRPPPPPPPPRQAPAPPPAKPPTFWTSCNKCKMNYEYLKVYLNHNLLCPTCREPFLAQEVPMPPTESVHAVHDPNISGANQNTNGSRNFQWGPFSRTAGAASATASSAAAAQAANVVHHTYEKVRREREEAQAAARREEALRRKYNPPKRQANISENLNLGTGGNSSKKMRTMGNDIGIGSSSILSGSGANYFGVPGGNISFSTNSGAHHFQGVNGGFSWKPRPPTRISLVKTFTQFDVRGILMEKAKSDLKDKLKEMQTRRSQVAANGKKNKKNMFKESGGDDESLASDDSTARQAAHVDPEDNASVNSTDADDENDDPLSYNVPDPDFHDFDKDRTEECFQSDQIWATYDDEDGMPRYYAFIQKVLSLEPFQLKISFLTSRTNSEFGSLNWVSSGFTKTCGDFRICRYETCDILNMFSHQIKWEKGPRGVIKIYPQKGNIWAVYRNWSPDWDEDTPDKVLHAYDVVEVLDEYDEDLGISVIPLVKVAGFRTVFQRNQDLNAIKKIPKEEMFRFSHEVPFYRMSGEEAPNVPKDSYELDPAAISKELLQEITETVESSKATSEC

SEQ ID NO: 55535 - protein, 730 aa, Oryza sativa
MGESRGSIAFFASYRPPVALDIFCCPAPPSSPKDELHLTDGDSYNYNCQPIPPAALKTVVERLGVSRGDAVEGDIDSGRITGLVFVSEREHNLETLHIALRFNDDGEVQVFSLADAYGGDGLFSGARMEDSGCIAGGYEVDGRTVDHYLVYVSTKEPVRERRSPWNVAYKTNLRTGETERLTPPGTFDISPSVSPSGKKVAVASYQGKKWDGEIKNLNTNIYVMSLENPSQDRERVIENGGWPSWGSEDVIFFHRKDGDGENSCWGVFRHTLSTGETVRVTPAAFDPVTPAAIDETRVAVAAIRQKSEFSDVRVEAQYRHIEVFDMRSPEQPMQITRNTRPKADHFNPFVMDGGKFIGYHRCKSELLQHGDDLPRKFHKLQSPHEDVGVFRVSGVFPTFSKDGSQLAFVDNEFKSVWLADSQGMRVVFKTDGPDSVFSPLWNSKKDILYVCMGPSFKASETLEIHSIHNVSTGDRKSRQLTFGGFNNAFPSTNPDGTKFVFRSTRDGGAKYSKNLYIMEDADAGEGEDGSQSTVTRMTAGEWTDTHCQWSPNGKWIVFSSNRDRPADAPERDHGLDPGYFAVYLMDVASRSVVRVIRSGYDVAGHVNHPVFSPDGRSIAVTSDLAAVTADPMSLPLFLHSVRPYGDIFTVDIDPDDMARNEDVEGFVRVTHSRYENSTPAWTVFSTHDPHAQWNLLVVEDEHVPSCPYAHPDGGESWHMTGQICIPKRHC

SEQ ID NO: 55536 - protein, 494 aa, Oryza sativa
MPLRPPPPPQGFLTAYPSAAFPPVKRPHEDDLGAGDVLTFRFHSLAVLKLFDRIREYRLHDYRYQATRGWYSSGTAPEDALLPCAVARPPRMYGCVIGVQRGRTVEVVDTSDILLDTDPGTLDRDLLKKKLETYKKAFPGLAILGWYSIDTHVTNTDMETNQALMDASGTTFYLLFNPAMNLSLKDLPVTIYEKVHSTNRSPTPLIFVQGKYKTETVEAERISLDHTCPVVSDVSVPPLVGKGQHANIMQTSGFKLMLFEIPSGFAMFEVSQELIARPKDIWARFAYQDDITNVIVTLGSIQIHNKSVARDIIVGPGDELKEFILSFCTHNYLIVQDVELKDVIEKKLNIYCYCNPTVVGELTWGLNYVLHKLLPQEQSLTHEPYLPLSKAMSKQIKEYGFKISPREGIVPRDERYTRAEIMEFIDFIIAAPENRSRTLSFLRRIEAASIDDSPPPPSLPGGMGVSLLKRLRLDWITVCCLGCAVALYPFYRRV

SEQ ID NO: 55537 - protein, 679 aa, Oryza sativa
MSGAKPAMGQTQGDGCPVQQIYSYLEKATDSDKFHADRKPAPCDGSSRRKSNATSLKVLLAKEMTKEVELKRKPPGVVARLMGLEEDLPANGPVLHQAKSGFRKSQSCNQLKALNKDLKQQEQHRLIKSTTQDIHPFCQEAVQYNDVYEVSEAQTRMSYFQDKISQKGGSSGNTSNRVDILRGSVMEKKCLGMAEKPLHSKDLQEALRVVSSNKDLFLKFLEEPNSIFSRQLVGPHTNLAPPQKKRITVLKPLGSFESDGTRQTGTEQIQEQNGAAMREFHQSSNFKEENPSLPSRIVLLRPTPGKPSLTNAKLTPRTTPFLSINPSDFRVALDGNGATLRSTKVEPGIIHNQQDGCHQGDESFLSSSYSNGYGGDESSLGDSEIDQNSDSDIDYIEDEGDSFSDSGGCSPVSKRTWHYTKKHGNPYLGSSFSKISHFAESSVTKEAKQRLSERWATVTCDEISQEQVELPRSTCTLGEMLSLQDVKNDNFINELPSVSTSRCYDRENELPTQAKYATACRKDEKNGERPMGLPRSTSVPLIPSTLNNMVANVKTSNHQGHERTKHIVASNKEKSFFRGRVSDFFFPRSKRTTRQISANHTSDLSSGNTEDCGGDSQQDANHDLDGNEKSTICEDILDICAVQSTSTSEGTTALTDVPASLDCRSGNLNKLGLNEVQSK

SEQ ID NO: 55538 - protein, 493 aa, Oryza sativa
MFSHGADSAHDAGAVSTGASGVPTRFVWPYGGKRVYLTGSFTRWTEHLPMSPVEGCPTVFQAICSLSPGIHQYKFCVDGEWRHDERQPTITGDYGVVNTLCLTRDFDQINTILSPSTPGSRMNMDVDNDNFQRTVSLSDGIIQEGPQRISEAAIQISRCRVADFLNGQTGYDLLPDSGKVIALDVNLPVKQSFHILHEQGIPVAPLWDSFRGQFVGLLSPLDFILILRELETHGSNLTEEQLETHTISAWKEAKRQTYARNEGSWRANHHLVHATPYESLREIAMKILQNGVSTVPIMFSSSPDGSYPQLLHLASLSGILKCICRYFKNSQGNLPILSQPVCTIPLGTWVPKIGDPNGRPLAMLRPNTSLSAALNLLVQAGVSSIPIVDDNDSLLDTYSRSDITALAKDKVYTHIRLDEMTIHQALQLGQDANSPFGFFNGQRCQMCLRSDTLLKVMERLANPGVRRVFIVEAGSKRVEGIISLSDIFKFLLS

SEQ ID NO: 55539 - protein, 215 aa, Oryza sativa
MNAFRFLGDMTHLFSVLVLLLKIYATKSCSGVSRKTQELYMLVFVARYMDLFTDYISLYNSVMKVVFITSSAAIVWCMRRHPQVRRTYDKDQDTFRHVVLVAAAFVLALLFNERFTFREICWAFSIYLEAVAILPQLVLLQRSRNVDNLTGQYVFFLGAYRAFYILNWIYRYFTEGHHSRWIPWIAGLVQTALYADFFYYYFLSWKNNVKLELPA

SEQ ID NO: 55540 - protein, 302 aa, Oryza sativa; identical to SEQ ID NO: 54052

SEQ ID NO: 55541 - protein, 853 aa, Oryza sativa
MDDSCAVCADALEWVAYGACGHREVCSTCVVRLRFVMGDKHCCICKTECSSVFVTKAMGDYTKVINDFNIFPPVATEGKVGEYWYHEDSQAFFDDAEHYKMIRAMCRLSCSVCDKAEDQAGQAAQVRRKSKFRSIEQLKGHLFHQHRLYMCSLCLEGRKVFICEQKLYTRTQLNQHVKTGDSEVDGSEVERSGFAGHPMCEFCRSSFYGDNELYTHMSREHYSCHICQRQHPGQYDYFRNYDDLELHFRKDHFLCEDEACLAKKFVVFQSEAELKRHNAMEHGGRMSRAQRNAALQIPTSFIYRRNEQDERRGRGRGRNSHRDGSDRDTPSMQNGSAIIGNGFPSRVDNVTGSVSVSSSSGRGESGQSSGNGRVFEHLSFPPLQDQDIPDARMDSAPDETSFPSLSEQQTRYAHALSQSSLAAKLGDELLFPPLPGSSSNRGSTSTQQGLQSLAKNTLASRLQQRSKGSVKVLHSARPRPSENPESVPPVSSSPQMWPTPDQGLLHSSSSQLRIVRENGIMSSADSAWNPGGGASNRMKHSVSTPNLMSGGSSVQALSTSNGGNKKQQPPQSSQTLPAADDVRAANKTLVERMRSALGMDEDRYSAFKEIAGEYRQGIIGTSEYLSYVEQFGLSHLVPEMARLLPDPQKQKELADAYHTNIRFRSLQENSDGLTITSKEGGRKKKGKGKSHDVTETSAAPAKDMKDSLADSFLDTVRKLQLNKTQEGEAEVLSRDGYRSSKGKAQLITGGSSSSTPCLDGDHGAISMASCAKDDVGKGGGSSNSNINKQSKKTSKFLRARLGDNSLATLDLSRPTMSPERPERESQGPQVGLPMRGVWKNGGGQKLFTGNGRK

SEQ ID NO: 55542 - protein, 601 aa, Oryza sativa
MAVAAATVRWLVLLLAVSAAATASREKWWHGAGGEASGGGHLVQKEWRRVVAASDAGLVTAVDVADAAGTAYRLHFITMSPGTLFLPVQLHADMVFYVHSGRGKVTYIEEGDSESSSLQVERGDVYNFDQGTILYIQSNACGTRERLQIYAIFTSDSINADDPRHPTSEVYSFVSDLLKGFEVEVLRPGFGVPREVVESIKSTKTPPAIIPYNPEEEDEDDSSNWTEEITDALWGVRDPHFLNKKKKDKQKDKHKGKDKKSKSKAFNFYSGKPDVENCYGWSRSMTNRDLETLRGSNIGMFMVNLTTGAMMGPHWNPRATEIAVVTQGAGMVQIVCPSIPSGESKKHHHDEEGGRGDHGHGGGGVRCKNSLFRVKEGDVLVVPRFHPMAQISFNNDSFVFVGFSTDMGHNHPQFLAGRHYVLQVIGKEILARSLGQDNSTNVGRLLSSQRESAIMACTSCAEELERKAEEEEEGGGGKGEKEREEEERRQREKEEEERRRQEEERKRREEEEKERREREEEERRQREKEEKKRREEEEQRREEEEEERRREEEEEEQEDGRGDEPKPRREEEEGDWGERQIRLPRSLKKRFIGIKGRLSSG

SEQ ID NO: 55543 - protein, 538 aa, Oryza sativa
MDLSQGKSLVVLVYNSLGWKREDVLRIPVISDSIVVHDSEGREVESQLLPIANASLYMREKHVKAYLGMLPAAKPKFWLAFPVSVPPLGFNTYFISSGKKSASVSLMSTLHSSQGSENSNMQIGQGQLKLQYNAAGALSLYSNSKTQVEANFEQKYKYYIGQDGNGSDPQASGAYIFRPNGTVPIKTDGQVPLTVLRGSILDEVHQQINPWIYQINRVYKGKDYVETEFIVGPIPVDDGNGKELSTEVVTNMATNKTFYTDSSGRDFIKRIRDYRSEWKIEVHQPIAGNYYPVNLGIYVEDGSRELSILVDRSVGGASIKDGQIELMLHRRLLHDDGRGVAEALNETTCFDNQCEGLVIQGKYYLKIDPQGEGARWRRTFGQEIYSPLLIAFAEQDGGNWVNSHVTKFSAMDPAYSLPDNVALLTLQELEDGTVLLRLAHLYEAGEHKDLSALASVDLKRVFPDKKIVKIVETSLSANQERSAMEKKRLKWKVEGPPADEKIVRGGPVDPSKLVVDLGPMEIRTFLINFAPQSGKQLM

SEQ ID NO: 55544 - protein, 370 aa, Oryza sativa
MATRSALPPRRRGLPEELVVWEILVRLPPKPLLRCRLVCRAWRRLTSTRGFLLAHHRHQPSLPLVVGYGCDGGSLLDILTLDRRDAARPRLHPVVRLKNAAHFVSASCDGILILNMTNCGEFYYSVCNPTTRQFADLPMLTGFFVMGFYQHRPTGEYRLLLYYQFRPEGSEDRYACYVYTLGSSEMPRCIGWMEEVATCTAVVLLHGSLHWYNYKTDKILIFNTASESFWSMRQADKMNGNDLFEIDGTLGIYFCNDDATIVDIWVLQDYKTEFWSLKHRIELPVPDIKGKLDDGDDWSAMVLSEDGDVLVLVYYRQWLLYIGTDGKLLASFQHDVGCHYNTPLKLKQSLVPHAFFPLLKGYVVNARPFI

SEQ ID NO: 55545 - protein, 344 aa, Oryza sativa
MASFTAGGGGANNNPNKSLEVNPAPGDSVSSLSFSPKANHLVATSWDNQVRCWEIQPGGQCQAKASISHDQPVLCSAWKDDGTTVFSGGCDKQIKMWPLLSGGQPMVLSGHEAPVKELAWITQMNLLVSGSWDKTLRYWDVRQPQPAHVQQLPERCYALSLSYPLMVVGTADRNVIVFNMQNPQAEFKRIVSPLKLQTRCLAAFPDQQGFLVGSIEGRVGVHHVDDGQQGKNFTFKCHRDGNDIYAVNALNFHPVHHTFATSGSDGGFNFWDKDSKQRLKAFNKCPSPITCSTFNQDGSIFAYAVCYDWSKGAEKHNPSTAKTNIFLHSVQESEVKGKPRVNKK

SEQ ID NO: 55546 - protein, 542 aa, Oryza sativa
MAMDLDEPLDAEKGEAALRRLRDADPALYLSPSADLAAAAREASKHLYASLVPFSPAQPPPLSNLLAGPAFDAEQIWSQIELLSRPLIPHLRRQLRRLEKQPPSQPPPRTESKSADAEEKSEEEDEEDGEGDEELEELDDVDDEEESEEEEEEEEEDKEGLEDKAGNQVEDEFFKIKDLDKFMVKGEEAEYGGGAKQGKKKKKTENWMEEDSDEEEEEDLDEDEDNEDEEDDDEHLDLEDFDDEEEEEEGAVGDIMYKDFFEEADDQKVRKKGGSKKVQFKDEPDEPEVDDKNDDGNDEQGLSTHEKARLKMHAKIEEMEKANLEPSMWTMQGEVNASSRPKNSALEVDLDFEHNVRPAPVITEEVTASLEEMIKKRIIEGHFDDVEKPSPLQFKSPKEQKDLDESKSKKGLAELYEDDYAQKAGLAPAPLSISDELKNEANTLFKRICLKLDALSHFHFAPKPVIEDMSIQANVPALAMEEIAPVAVSDAAMLAPEEIFEGKGDVKEEAELTQAERRRRRANKKRRYAGSHKERPAKMQKD

SEQ ID NO: 55547 - protein, 391 aa, Oryza sativa; identical to SEQ ID NO: 43773

SEQ ID NO: 55548 - protein, 389 aa, Oryza sativa
MVLRACTMVEGSSFVVGGGGGVPFFEWLKPRSSPPPSPSSSSTATTSSSLTAQRQPRGAGTMLCLPLLGRLGEEPVDAGDGGAMNNPPVKEEVSNTTDDYAGVDLNIGLPATTGGGSSEDAPMDEDEEDDDDDEEEETEDDEEKAAGLEGCKVEEKEREQVHSEGSKYYVSVGGGEDQSSNAGDVDAGAACRGRRYWIPTPAQILIGPVQFVCHVCNKAFNRYNNMQMHMWGHGREYRKGPESLKGTQATATLAMLKLPCYCCAAGCRNNVGHPRARPLKDFRTLQTHYKRKHGAKPFACRRCAKPFAVKGDWRTHEKNCGKRWFCACGSDFKHKRSLNDHVRSFGGGHFPVAAAAAAAHAAAAPPKQQQRIIRFDDAMAQMHGGGLMN

SEQ ID NO: 55549 - protein, 664 aa, Oryza sativa
MSPPMPLPHLTVLLVLFATSAAQAAADRSSSSSSCGGGERCGDILLPFPFHLNSSCVSSTTNSSSRFRLSCDTTNATLTLPLGSATFRVLGFLPSGSILLDYAPAASSSPSSPCDPAYAAFSRPSSPAAALDAAAAFLAVTPANVLRLYACEDSSLCRAGCEDVATCGRGGAAAGAKSGCCYPLSDGSVWKPGDGLGAFAEFGCRGFSSWVKNRSAAAPGVVRGIEVEWAVPKGSEMAACADGAVAVNATAVRGGVRCACAAGLVGDGFAHGTGCSKGTSCSNSGQASDGRECCQGRFCSKKSVALAGFFVSLFFLAAAVSFWLFLRQPSKDTLWDIDPACIPKIFGGVCNARQFTYEQLDEATKRFDDSEKAAVNVQVDGGGTVHAGVLDDGTVVAVQRIGYDTAEKLRLVLDRVELLSEVSHRNIARVVGFCCTAAADSGTGNALLLVHEHFAGGTLEDNLRQVKGRLLSWYHRVNIAIELASALTYLQAHDTAPTFLHDLKSSDVFLDDNLTAKIAGYKLARPVAYYYYAPSYDHDVVRNFGHLLIELLTGMRHQHPFDSVAPKVREGRLHEVIDVTLLAGKQLPAPNEDVRKVFELAVACLLSAENGLCMLGVAKELMQIVRNNIGSSSKIEISLEETFSSSSLLQMISMSPETLHHHLP

SEQ ID NO: 55550 - protein, 397 aa, Oryza sativa
MAPVKKSKKGKRKSKDSGKLKIVKYGGGAPPLPPELRGLDTEWWYTFLHKHSELGLSAPSDEGEAFRYFFRTSRRTFDYICSIVREDLISRPPSGLINIEGRLLSVEKQVAIAMRRLASGDSQVSVGAAFGVGQSTVSQVTWRFIESMEERARHHLVWPGQERMEQIKARFEAESGLPNCCGAIDATHIIMTLPAVESSEDWCDPAKNYSMFLQGIVDDEMRFIDIVTGWPGSMMFSRLLKCSGFFKHCDAGTRLDGPVMVSAENGEIREYIVGNNCYPLLPWLMTPYEGESLSAPMASFNARQKAARTLGPRALSRLKGSWRILNKVMWRPDKNKLPSIILVCCLLHNIIIDCEDELLPDVQLPDHHDTGYSEEKCEQVDPNGKIMRDVITGYLQI

SEQ ID NO: 55551 - protein, 280 aa, Oryza sativa
MARTKLVSLSFVVLLSVGLADAARVARYASAEGGGSGGGGGGGSEDGSGWGSGSGSGYGQAGGSSGGAYASGGGGGQGGGGGQNGGSGYGSGSGSGYGQAGGYGPHGGAYAQGGGQGGGGGGGVNGGSRYGSGSGSGYGQAGSYGPGGAYAQGGGQGGGGGGGQNGGSGYGSGSGYGQAGSYGPGGAYAQGGGQGGGGGGGQYGGSGHGSGSGYGQAGSYGPGGAYAQGGGQGGGGGGGQYGGSGSGSGSGSGQAGGYGPYGGGYAQAGGQGGGGGGGHP

SEQ ID NO: 55552 - protein, 123 aa, Oryza sativa
MEKRIRKTCLKKVVGMINLLHQMILLHVKLHMLIQRTMLLLIAQMLMMKMMILYLIMFLILISMTSIRIVLKNVFRVIKFGLHMMMKMVCLVIMHLFRKFSPWSHSSSKLAFSHQGQTVNLVL

SEQ ID NO: 55553 - protein, 339 aa, Oryza sativa
MAGALHISCSPAPLLWALLLLTVSPGNAFYLPGSYMHTYSQGEEIWAKVNSLTSIETEMPFSYYSLPYCRPQGGIKKSAENLGELLMGDQIDNSPYRFRVNVNESLYLCTTKGLNENDAKLLKQRTRDLCQVNMMLDNLPVMRFTEQNGITVQWTGFPVGYTPAGISEDYIINHLKFKVLVHEYEGRNVEIIGTGEEGSGVISEFDKKGMSGYQIVGFEVVPCSVKRDAEAFSKSNMYDSIEPVSCPMELQKSQVIRQQERITFTYDVEFVKSDIKWPSRWDAYLKMEAGAKVHWFSIMNSLMVILFLAGIVFVIFLRTVRRDLTRYEELDKEGAGTDE

SEQ ID NO: 55554 - protein, 313 aa, Oryza sativa
MFHYAIFSDNVLAASVVVRSAVANSLDPSKHVFHVVTDRMNLGAMQVIIRLMDLKGAHYEVKAFEDYKFLDSSYVPVLRQLESANLQKFYFENKLENATKDASNMKFRNPKYLSMLNHLRFYLPEMYPKLHRILFLDDDVVVQRDLTGLWKIDMDGKVNGAVETCFGSFHRYWQYMNFSHPLIKEKFNPNACGWAYGMNFFDLDSWRREKSTEQYHYWQSQNENRTLWKLGTLPPGLITFYSTTKPLEKSWHVLGLGYNPSISMEEIRNAAVVHFNGNMKPWLDIGMNQFRHLWTKYVDYDDSFIRQCNFAPP

SEQ ID NO: 55555 - protein, 388 aa, Oryza sativa
MSSGGGGGDDYKREESVALMVIVSLAALSLLSLVAAFAYYCYITRKVSRRLHSLDLPKHHRRSSSSSPPPMPPPLPPPPPSANAPTLGKESPSSNSASDGAAAAVVVGGERGAVQVFSYRQLHAATGGFGRAHVVGQGSFGAVYRGVLPDGRKVAVKLMDRPGKQGEEEFEMEVELLSRLRSPYLLGLIGHCSEGGHRLLVYEFMANGGLQEHLYPNGGSCGGISKLDWPTRMRIALEAAKGLEYLHERVNPPVIHRDFKSSNILLDKDFRARVSDFGLAKLGSDRAGGHVSTRVLGTQGYVAPEYALTGHLTTKSDVYSYGVVLLELLTGRVPVDMKRPPGEGVLVNWALPMLTDREKVVQILDPALEGQYSLKDAVQVAAIAAMCV

SEQ ID NO: 55556 - protein, 373 aa, Oryza sativa
MEAQAQDKAEEGEEEGTRQQHAQAGPVGAAGGGGGGGAAAVAMSAIPMNSWLVPKPEPVEFFGGMAMVRKPPPRNRDRHTKVEGRGRRIRMPAACAARIFQLTRELGHKSDGETIRWLLQQSEPAIIAATGTGTVPAIATTVDGVLRIPTQSSSSSGPASSAVVDGEESSAKRRRKLQPTRAVAGASPLATAAPAAYYPVIADPLLQGSGGAAISVPSGLAPITATGAPQGLVPVFAVPATGSPAVAGGNRMIPQATAVWMVPQPAGAAGAGNQPTQFWAIQSAPQLVNFAGAQFPTAINVADFQQQQQQQRVSTTIIQNSNSGEHMHFSGADSHEQQRRGRKEGNSGGVVDHPEEDEDDDDDEPVSDSSPEE

SEQ ID NO: 55557 - protein, 581 aa, Oryza sativa
MPATYGYLPSLQVLSASHNRICGELPVELANCSNLTVLDLRSNQLTGPIPGDFARLGELEELDLSHNQLSRKIPPEISNCSSLVTLKLDDNHLGGEIPASLSNLSKLQTLDLSSNNLTGSIPASLAQIPGMLSLNVSQNELSGEIPAMLGSRFGTPSVFASNPNLCGPPLENECSAYRQHRRRQRLQRLALLIGVVAATVLLLVLFCCCCVYSLLRWRRRFIEKRDGVKKRRRSPGRGSGSSGTSTDSVSQPKLIMFNSRITYADTVEATRQFDEENVLSRGRHGLVFKACYNDGTVLAILRLPSTSSDGAVVIEEGSFRKEAESLGKVKHRNLTVLRGYYAGPPPDVRLLVYDYMPNGNLATLLQEASHQDGHILNWPMRHLIALGVSRGLAFLHQSGVVHGDVKPQNILFDADFEPHLSDFGLEPMVVTAGAAAAAAAASTSATTTVGSLGYVAPDAAAAGQATREGDVYSFGIVLLELLTGRRPGMFAGEDEDIVKWVKRQLQRGAVAELLEPGLLELDPESSEWEEFLLGIKVGLLCTAPDPLDRPAMGDVVFMLEGCRVGPDIPSSADPTSQPSPA

SEQ ID NO: 55558 - protein, 377 aa, Oryza sativa
MMARWCVGWPAAARGGRDELTWQAELTAHAAGEFSMAAAQANAVMEDQAQVMASPGATLVGVYDGHGGPDASRFLRSRLFPLIHEFAAERGGAVDADVIRKAFLAADEEYLQLLRWSLPNMSRAAASGSCCLLGAISGDTLYVANAGDSRAVLGRRAAAGQTVAERLSTEHNVASEEVRRELAALHPDDGEVVVHARGAWRVKGIIQVARAIGDVYLKTPEFKRDPAVQRLCSAAAAVELARPVVTAEPSIHARKLKAGVDLFVVFASDGLWEHLSDEAAVQLVSKSSTRRGVAARLVQAALGEAARKREVRRGDLRRIERGVRRHFHDDITAVVVFLDLDDDGGRRARRRGRVVDSSSSSCSNTPLDVYSLYNSTA

SEQ ID NO: 55559 - protein, 681 aa, Oryza sativa
MGVGDGGSGGGYEPAYGGMGSYGQSFFNISYARSQPPPPSVSYEHRLQATDARVHYYAGEGNPQAPPLGYGGGYGYPPQGSSSYNQYAYGGYYGGASPPPPADIPSTSRGEVTPPAPPSPPRVSTWDFLNPFETYESYYEQPTAAQASYTPSRSSKDVREEEGIPDLEDEDMEVVKEAYGDEKHAANGYSGKGKMAKEEGGRSSTGDELPHESKLSEASSSGSNQEHDVHVVEKSVVGEQVQRSEPRQHVAGLPPIGSEKTYFDDAEVVLEIRTQFERASKSAIEVSKMLEVGKMPYYPKSSGFKVSAMMICGIPTMEEEFLRFEEDKAMGCGNLSSTLQKLYMWEKKLLEEVKAEEKMRALYDRQREELKILDEKGAEADKLEATERSIRKLSTKISIAIQVVNTISDKISKLRDEELWPQTCELIQGLMRMWSTMLECHQIQLHAISHAKNIDSMINGAKFGEAHMDLIKRLELQHLDWIASFASWVNAQKSYVGTLNDWLRKGVTYEPEVTDDGVPPFSPGRLGAPPIFVIYNNWAVGVGRISEKEVVEAMQAFASNVLGLWERHRSEQRQGLMANKGMDKDLRVMERDEQSMRKALEAQNKKLVLISNQSGVSLSAQAQALQDGGSHGDTGSLQLSLKNIFEAMENFTANSANTYKDLHLRAEEEKARVAQESCRVS

SEQ ID NO: 55560 - protein, 671 aa, Oryza sativa
MAASSLLDLSSNRLTGTLPPELCSGGKMHTLIALGNFLFGAIPDSLGECKSLSRVRLGENYLNGSIPKGLFELPKLTQVELQDNLLTGNFPAVSGAAAPNLGEISLSNNQLTGALPASIGNFSGVQKLLLDRNSFSGVVPPEIGRLQKLSKADLSSNALEGGVPPEIGKCRLLTYLDLSRNNISGKIPPAISGMRILNYLNLSRNHLDGEIPPSIATMQSLTAVDFSYNNLSGLVPGTGQFSYFNATSFVGNPGLCGPYLGPCRPGVAGTDHGGHGHGGLSNGVKLLIVLGLLACSIAFAVGAILKARSLKKASEARVWKLTAFQRLDFTCDDVLDCLKEENVIGKGGAGIVYKGAMPNGDHVAVKRLPAMGRGSSHDHGFSAEIQTLGRIRHRHIVRLLGFCSNNETNLLVYEYMPNGSLGELLHGKKGGHLHWDTRYKIAIEAAKGLCYLHHDCSPLILHRDVKSNNILLDSDFEAHVADFGLAKFLQDTGASECMSAIAGSYGYIAPEYAYTLKVDEKSDVYSFGVVLLELVTGRKPVGEFGDGVDIVQWVRMMTDSNKEQVMKVLDPRLSTVPLHEVMHVFYVALLCIEEQSVQRPTMREVVQILSELPKLAPRQGEVLSHAVDGFASNPPAPVPSGSAEALTGDAKDQQQQQTNSESTTPPDLISI

SEQ ID NO: 55561 - protein, 497 aa, Oryza sativa
MATMDEQQPLHILFLPFLVPGHLIPIADMAALFAARGVRCTILTTPVNAAVVRPAVDRANDDALRGDAGGAPAIDIAVVPFPDVGLPPGVESGTALASEEDRGKFVHAIQRLREPFDRFMAEHHPDAVVADGFFTWSVDAAAEHGVPRLVFLGTGVFARSCQESMVRHNPVEACPDDDPDAAVSLPGLPHRVEMRRSQMIDPKKRPDHWAYFKMMNDADQRSYGEVFNSFHELETDYVEHYRTALGRRAWLVGPAAFASKDFAARGAAELSPDADGCLRWLDAKPHGSVAYVSFGTLSSFSPAEMRELARGLDLSGMNFVWVINGAADDTDASGQWMPEGFPELISPHGDRGLTIRGWAPQMLILNHPAVGGFVTHCGWNSTLEAVSAGVPMVTWPRYADQFFNEKLIVEVLKVGVSMGSKDFASNLENHQVIGGEVIAGAVRRVMGDGEEGAEAIRKKAAELGVKARGALEKGGSSHDDVGRLMDALMARRTSVDV

SEQ ID NO: 55562 - protein, 640 aa, Oryza sativa
MDLVFAGQSATDEVIANLIDKASSYLGSNPDRLQESMRMLRLKLPKMRDTLIPAQSRESYSGLGVLLDESLWRLRDAVEELEDAVDEHAYHEKKTKEREVSDGDLGSSFSKMKQRVIKSLANGRTLERRLRKAIEALDMVIVDIAKRLPSDVRLTQEQLDQHRLQLYRRTVDFTQRYFMTAGFKDRVLGREKETDVIVRWLIDPLDDDDAETQVSPNNHHVSVMSIVGHGGVGKTTLAQLVYNDPRVRDHFDMVAWLCVTSSFDVGRIMREIVQCVTRSPCSSDSLENMQHILQDKINSTKAFLLVLDDAWEENLHEWEKLFSVLRGINTRIKILLTTRTQSVATLVESVTGCEDQHLRLHELEENGNLQIFCQLALADLNERSEDYAELQSIGAKIVKKLGGTPGAIKSAAYLLRVRSLESWRRFLHGMDNFGAAVPNIMDVLKISYYRLSAELQSCFRYCSLFPKNHPFRKEELVRAWIWSGLIFPQFGKKDGELYLAQLTANLFLDRFGGENEEPAYYVMNDTMHDFATYISQGECKRLTEAADLRNVKSSVRHISIAGINNFTVVDVKELLRLTKLRTVIIEDCGNVEEDVVYAMAEVVKNSKSLRLLECSLFKMCHLPDRLSSLMHLRHVKISML

SEQ ID NO: 55563 - protein, 178 aa, Oryza sativa
MVAYRFHQYQVVGRALPTPGDEHPKIYRMKLWATNEVRAKSKFWYFLRKLKKVKKSNGQMLAINEIFERNPTTIKNYGIWLRYQSRTGYHNMYKEYRDTTLNGAVEQMYTEMASRHRVRFPCIQIIKTATVHFKLCKRDNTKQFHNSNIKFPLVYRKVRPPTRKLKTTFKASRPNLFM

SEQ ID NO: 55564 - protein, 92 aa, Oryza sativa; identical to SEQ ID NO: 29861

SEQ ID NO: 55565 - protein, 142 aa, Oryza sativa; identical to SEQ ID NO: 47419

SEQ ID NO: 55566 - protein, 510 aa, Oryza sativa
MASAALPEAVAPKKKGNVRFAFACAILASMTSILLGYDIGVMSGASLYIKKDFNISDGKVEVLMGILNLYSLIGSFAAGRTSDWIGRRYTIVFAAVIFFAGAFLMGFAVNYAMLMFGRFVAGIGVGYALMIAPVYTAEVSPASARGFLTSFPEVFINFGILLGYVSNYAFSRLPLNLGWRIMLGIGAAPSVLLALMVLGMPESPRWLVMKGRLADAKVVLEKTSDTAEEAAERLADIKAAAGIPEELDGDVVTVPKRGSGNEKRVWKELILSPTPAMRRILLSGIGIHFFQQASGIDSVVLYSPRVFKSAGITDDKHLLGTTCAVGVTKTLFILVATFFLDRVGRRPLLLSSTGGMILSLIGLGAGLTVVGQHPDAKIPWAIGLSIASTLAYVAFFSIGLGPITWVYSSEIFPLQVRALGCSLGVAANRVTSGVISMTFLSLSRAITIGGSFFLYSGIAALAWVFFYTYLPETRGRTLEEMSKLFGDTAAASESDEPAKEKKKVEMAATN

SEQ ID NO: 55567 - protein, 219 aa, Oryza sativa
MLASCTTKRNSQMDVAPVEQDQGLMKINSSDCSGDGASCENETNYTDHGKQSNELGHARISVTGGGYFHQLLAEHTIISEAFLSAATYSWFEKEKDLLSSQLSSLKRIWSQPQWQACLKHLCCHGEFRSAVLKIIKIFEEELSKCREETNMLHQPDQISHSTLMSLVSLIIPPLLKLIRFVHALWMDGAVLRFPEELIEARKMKNVDQILRFRGETLEF

SEQ ID NO: 55568 - protein, 288 aa, Oryza sativa; identical to SEQ ID NO: 30939

SEQ ID NO: 55569 - protein, 493 aa, Oryza sativa
MAAAAEGDEDPRWRRCNTDCVYFLASPFTCTKGSKCEYRHADGARFNRRNCWYWFKGNCVNPSCTFRHPPLENLNKTKSLADPLSLCSTSVKAANPCYFYYNSHCSKGDNCPYLHEPLTSNDAVGTSCKATTSNPAVSKSYVGDEMVEESKDTITNPCQDTSCHIKEVPVSINPEFGEAEAVSGALETSTDIDEYMKCSAVSDLNSGDSTMDHTEQDERDSSPGFDVLVDDCLSNKSDLEHQLTTESDNKVLHAEYGIRDPVLYDMYYHDPEYYNYEPEFCGLDDRQGYLYLCQPNGAHEHESEITLGHLLPQNTEVTSDEYDRRFFNPRNFTSSVADTNFVHQHTQIRHISKRRPENRKGAKGKKDCIKRSRCLEPKNSTQQIESMPTRQRKDYLMGECPQPANHATFRGRRKKNRGKQQHVLSAKSSEHPTADFTGPKTLAQIKEEKCKSNSSFSHSTACTPNVRSFSDDFEGPKSLTELLMTKSRSSVGK

SEQ ID NO: 55570 - protein, 554 aa, Oryza sativa
MVSNGNEDLKADVELVESTTVDNDTGAPGASTLPTQGVPRQGKQRNGFLNFCNRFSSGDRFKKLGPSPSFKFRQLALERDEFSRSIHSDSHDNHEHFQFIREINWGHLWVMCKDWIKEPLNMALFAWIACVTVSGAILFLVMTGMLNRALPSKSQRDAWFEVNNQILNALFTLMCLYQHPKRIYYFVLLCRWEQKDVLVLRKTYCKNGTYKPNEWMHMMVVVVLLNLNCFAQYALCGLNLGYRRSERPPIGVGLTISVAIGAAAFAGLYNIISPLGKDYDTELTEVDQEAQTELTRPATSRTSLEKRYSFIQSEERRFVESRPEWVGGLMDFWDNISLAYLSIFCSCCVFGWNMQRLGFGNMYVHIATFMLFCLAPFFIFNLAAVNINNENLREALGLTGLALCFFGLLYGGFWRIQMRKRFNLPANNFCCRSAEATDCFQWLCCSSCSLAQEVRTADYYDIAEDRSYTEQITARSQHVMTPLSREDGLPLFRSNPGSPYRSSTASPSIFIMESPSAPRRSPGPSPLGGSPTMGDRTMKAPTPSVLHRDGEPEL

SEQ ID NO: 55571 - protein, 831 aa, Oryza sativa
MVHETRSRTLAASQEEGKAAPKKQKTESKEQEGGQQAPSKNKKTADNEEHDGEQEPSKNKKLKAEESDLNGKATAVKEFSEFCKAIREHLTIEDMRKILQGNEQDASGSEDAVVPRCEDVMFYGPLDKCPVCGGQLECKGLKYNCTGTHSEWACCSFSTNNPSRRGGPIKVPDDVKNDFVRKWLKQQEGNKYPKRNLDDEGIFSGMMIALSGRMSRSHGYFKEQIMKHGGKVNNSVIGVTCVVASPAERHQGGSGGFAEALERGTPVVSENWIIDSVQKKEKQPLAAYDIASDVVPEGRGLPLGNLDPTEEAIETLAAELKLAGKRAVHKDSKLEKDGGHIYEKDGIIYNCAFSVCDLGGDINQLCIMQLIMVPENHLHLYYKKGPIGHDQMAEERVEDFGSRFNDAIKEFVRLFEEVTGNEFEPWEREKKFKKKCMKMYPLDMDDGVDVRHGGVALRQLGAAAAHCKLDPSVTFIMKQLCSQEIYRYALTEMGHDVPDLPIGMLTDLHLKRGEETLLEWKQDVESAPESGPAADAFWMEISNKWFTLFPTTRPYTMKGYEQIADNVASGLETVRDINVASRLIGDVFGSTLDDPLSQCYKKLGCSINRVVEDSEDYKMILKYLEKTYEPVKVGDVVYSATVERIYAVESSALPSYDEIKKLPNKVLLWCGTRSSNLLRHLRDGFVPAVCHIPVPGYMFGKAIVCSDAAAEAALYGFTAVDRPEGYLVLAVASLGKEIQEITGTPGSEDVKRMEEKKMGVKGVGRKTTDPSEHFTWRDGVTVPCGKLVPSTNKDGPLEYNEYAVYDPKQVSIAFLVGVKYEEQNMEVVPDE

SEQ ID NO: 55572 - protein, 158 aa, Oryza sativa
MSAMAMSSLNPNAAPFIPAAFRRVEDFSPEWWELVNHGVVPRPLVQAAPDVRGRCGGGGPPPPGVRRRPRRAPARRLARPPRHGRHRRPLLHPRPPRPPQADDDSHPRRRRAQGAQPQLAEVGRRRDGEARREAGPVRRRQGRRRPPRHPPASLERHG

SEQ ID NO: 55573 - protein, 288 aa, Oryza sativa
MASVPSDLASRPDLGSCMVAATSEMERLKQLFTARSVVAWSDEGQKVEIGTFADDIRSAFRIHRSDIQITKFYPEDFFLTFVNHSDREEVLQEPRLVTRSGRVYHFKPWNERRNAEVIDVRFHARVCIEGIPMHARSEEVATKIIGCKSSVHYIEEYSRRRNYNRTFDLWIWSSDLSSSILKASSFSITRPDSEARATDVPFPELEPPRMPGILPQLFLLFPNLSHLICCPCHRIRGLCSCLKDTWILCSVGPRWEVPSTPLILPCLVLPLLCLFFQLLQTHRRHQLR

SEQ ID NO: 55574 - protein, 463 aa, Oryza sativa
MARKQHIAIFTTASLPWMTGTAVNPLFRAAYLAKAGDWEVTLVVPWLSKGDQLLVYPNKMKFSVPGEQEGYVRRWLEERIGLLPKFEIKFYPGKFSTEKRSILPAGDITQTVSDDKADIAVLEEPEHLTWYHHGRRWKNKFRKVIGVVHTNYLEYVKRERNGYIHAFLLKHINSWVTDIYCHKVIRLSAATQEVPRSIVCNVHGVNPKFIEIGKLKHQQISQREQAFFKGAYYIGKMVWSKGYTELLQLLQKHQKELSGLKMELYGSGEDSDEVKASAEKLNLDVRVYPGRDHGDSIFHDYKVFINPSTTDVVCTTTAEALAMGKIVICANHPSNEFFKRFPNCHMYNTEKEFVRLTMKALAEEPIPLSEELRHELSWEAATERFVRVADIAPIMSIKQHSPSPQYFMYISPDELKKNMEEASAFFHNAISGFETARCVFGAIPNTLQPDEQQCKELGWRLQE

SEQ ID NO: 55575 - protein, 578 aa, Oryza sativa
MTEQLYTVASDSETTGEDKSQMSFPDVAIGIDIGTSNCSVAVWTGHQVELLKNTRNQKGMRSYVMFKDDSLSAGVTGGATREHGHEERDILSGSAIFNMKRLIGRMDTDEVVQASKSLPFLVQTLGIGVRPFIAALVNNMWRSTTPEEVLAIFLLELKALVEMHLKHPVRNAVLTIPVAFSRFQQTRIERACAMAGLHVLRLMPEPTAIALLYAQQQQQLLHDNMGSGIEKIALIFNMGAGYCDAAVAATAGGVSQIRALSGSTVGGEDILQNVMRHLMPDFDSLYAGQTMDRIKSIGLLRMATQDAIHKLATQEHVEINVDLGAGHKVSKILDRGEFEKVNQSIFEKCEGIIKQCLADAKLTPEDINDVILVGGCSRIPKIRSVVLGLCKKDDSYSGIDPLEAAVSGAALEGAIASGVSDPSGSLDLLTIQATPMNLGIRADGGNFAAIIPRNTAVPARRDMLFTTTHDNQTEALIAVYEGEGNQAEDNHLLGYFKITGIPAAAKGTVEINVCMDIDAGNVLRVFAGVVKPQGQAVPPFIEVRMPTLDDGHGWCGQALAKMYGSTLDLATIPKKLHP

SEQ ID NO: 55576 - protein, 103 aa, Oryza sativa
MNLDWDSTQDLVDFRVASTVSVDISLPSTYVKQTSTTAASRMGTDLDIMLINNVVPPYSGSYVSPRKGDKLMPRRANVIFTEAQVNILIIARCVCEFMKTWLR

SEQ ID NO: 55577 - protein, 437 aa, Oryza sativa
MSDGQETDKNIEIWKIKKLIKALESARGNGTSMISLIMPPRDQVSRVTKMLGDEYGTAPNIKSRVNRQSVLAAITSAQQRLKLYNKVPPNGLVLYTGTIVTEDGKEKKVTIDFEPFKPINASLYLCDNKFHTEALNELLESDDKFGFIVMDGNGTLFGTLSGNTREILHKFTVDLPKKHGRGGQSALRFARLRMEKRHNYVRKTAELATQFFINPATSQPNVSGLILAGSADFKTELSQSDMFDQRLQAKILNVVDVSYGGENGFNQAIELSAEILANVKFIQEKKLIGKYFEEISQDTGKYVFGVDDTLKTLEMGAVETLIVWENLDVNRYVLKNSATGETAIKHLNKEQEADQSNFRDTSTNAELEVQDKTSLLEWFANEYKKFGCTLEFVTNKSQEGSQFCRGFGGIGGILRYQLDIRSFDELSDDEGVYEDSD

SEQ ID NO: 55578 - protein, 719 aa, Oryza sativa
MSLVRSAPARQWAAWTRQEEQNFFNALRQVGKNFEKITLRVQSKSKDQVRHYYYRLVRRMKKLLGPEFSLDAKNSKDTIAAMLCWWSLLEKFSCSASKLHLKPRRFKTFVEALGNQLLKDRNKTRKKCPRGDVCLSSSSSAVNRTPGNESFSVKLLAVDVSNGSKVGSSKGSFFKKVTEPNCSNKSGATKGDLSATRTVKQKRRAGGVVASAAYKKWERAAMAGVSLVADAAEELERNTVNADARMLSPSSSNACTVDGLGTNHIKEADQQAPAKLKLQLFPINEATRKALEKDEHNPHLELTLSARKKISSVLEHLNRKWGNSNIASGELLLFPYCAHQEDLATYQRWTTKDTVAVADVFLSVNSPSVFRLRYGWFSLAELEAGVSEISLTHFENCLIPEDIHAKSPLEACVQKDGNSLSSCAPEQHPCGSKDQSALLFAMPSSTGKSAQVPEQCIDVLPSQFGRQNQDQVTTNQVFEVDQGMDCAAVSEGEWADTLTDISVGYLLTEASRGANTDCPGTSVVKNTLLLENPCSYDSFDAAVALHASRYKSAEQPALASHSTIWGAEETCDAFSFNLPASRKREGSNNSASSSPDSDSDVHPSNSEGFQCFLQDLAGAAVAHNPCIDDAKDVESLCAESPPRSDHDSAPKDQSLADLYWPDSLGPLDLDIPSATYHADDLLLGDSQNSWNRMMANSLDAFRNLSFFTADKNDSIPSIM

SEQ ID NO: 55579 - protein, 287 aa, Oryza sativa
MSSPGESGPSASAKDTDAAQRAQEQEPGKQGGATRERRMESLGWLTESAVMPKKHKAIEGVGAASILDLKAQLYRTQEEARKPTAHDAAAAAAASGEFRRAKKRAAPGDPLGAKNSGVDARAHKDKLELKAVKDGSVSYAALEKKAELYEKLSRGEIPDEEDKEKYCVDFFQKSFDHVYEPRQPESQSVIDRAEPENDNDDSMSSAKPVGLGRTGTTIDRDEHKRFVREVHEEVSEARQKASTMKSRRQEQEAARREKLKQAYLKKRLEKLLAEKRATSATDDQPAS

SEQ ID NO: 55580 - protein, 484 aa, Oryza sativa
MGEASSSSGHPRQNPHVLGYGFHGAMPNSLPSANLFEQQGGANYFGELEEALMQQVATLRRTQQTATTTSTLHHGDTTPFSTTATAAATARPPPTLDIFPSWPMRSLHTPKEGSNVTADTTDSESSSKNNSNQNASSDQHVLVGDMAGQFDQIPQQEQHKKMATNSPTHSSKTGKALDPKTMRRLAQNREAARKSRLRKKAYIQQLESSKLKLAQMEQDIHRARSQGLLLGAPGGNTSSGAAMFDVDYARWLEEDSQRMAELHGGLHAHLPDSDLRAIVDDTLTHYDHLFNLKGMAAKADVFHLITGMWATPAERCFLWMGGFRPSELLKTLTPQLDPLTEQQVVGICNLQQSSQQAEEALSQGLDQLHQSLAETVAGGSPLDDPNVGSFMGHMAIALGQLSNLEGFVIQADNLRQQTIHQMHRILTVRQAARCFLAIGEYHNRLRALSSLWASRPREILVADEGNCGELSIAAHQSESQYSAF

SEQ ID NO: 55581 - protein, 626 aa, Oryza sativa
MGLRSPNSMLWLVLLVWAALLCGSCHGRFVVEKNSLKVTSPSDMKGTYECAIGNFGVPQYGGTMVGVVAYPKANKKACKSFDDFDISYKAKPGSLPTFLLVDRGDCFFTKKAWNAQNAGAAAILVADDKTEPLITMDTPGESGNTDYLENITIPSALITKSFGDKLKKAIDNGDMVNVNLDWRESLPHPDERVEYEFWTNSNDECGPKCDSQIDFVKSFKGAAQVLEKKGYTQFTPHYITWYCPDSFILSKQCKSQCINHGRYCAPDPEQDFSKGYDGKDVVVQNLRQVCVYKVAKEHGKPWLWWDYVTDFAIRCPMKEKKYTKECADGVIKSLGLDHKAIDKCIADPDADKENPVLKAEQDAQIGKGSRGDVTILPTLVINNRQYRGKLDKGAVLKAICAGFRETTEPAVCLSEDIQTNECLENNGGCWQDKAANISACKDTFRGRVCECPVVKGVKFVGDGYTHCEASGSGHCEINNGGCWKDSRHGRTYSACTNDGCKCPDGFKGDGVHKCEDIDECKERTACQCKECKCKNTWGSYECGCSGGLLYMKEHDTCISKNAATEVGWNFLWVIFFGLVVAGIAGYAVYKYRIRRYMDSEIRAIMAQYMPLDNQGDVPNHSHHIEL

SEQ ID NO: 55582 - protein, 256 aa, Oryza sativa
MERQGLDLGLSLGLGLTTAATWPAAGFCLNSVMAEQEVIRRDDVVAATAAEDERFACSPGSPVSSGSGKRGSGSGSGDEVDDAGCDVGGGGARKKLRLSKDQAAVLEECFKTHHTLTPKQKVALAKSLNLRPRQVEVWFQNRRARTKLKQTEVDCEHLKRWCDQLADDNRRLHKELAELRALKATPTPPAAAPPLTTLTMCLSCKRVANAGVPSPAAAIFPGHPQFLCGFRDHAGAASSSYGGASSGLAKAVRAAR

SEQ ID NO: 55583 - protein, 488 aa, Oryza sativa
MGARCSKLSVCWWPPHFKSPLLENGAAADDGSGVPVFAEYSLDELRVATDGFSPERIVSEHGEKAPNVVYRGTLFSTGRTVAIKRFGRSAWPDSRQFLEEARAVGQLRSVRLANLIGCCCENGERLLVAEFMPHETLAKHLFHWETKPLSWAMRVRAAFYVAQALEYCSSKGRALYHDLHAYRVLFDVDGNPRLSCFGLMKNSRDGKSYSTNLAFTPPEYLKTGRVIPESVVYSFGTILLDLLSGKHIPPSHALDLIRGKNYLVLMDSCLEGHVSSSDGTELIRLASRCLQYEGRDRPNLKSVVSALGNLQKDASAPSHALLGIQHDKENTERISLSAIAKVYARADLDEVHEMLENDGYCEDERATFEVSFHSWTGQQVSDSILVKKHGDSAFQSKDFATAVECYSRFIDTGVMVSPTMLARRSFVYMVLGKLQEGLADAKKAADISPEWPTAHYLQGMAYLAMGMEPEGHEELKQGAALEAERNAR

SEQ ID NO: 55584 - protein, 521 aa, Oryza sativa
MEVNGGGAAGLPEAWSQVRAPVIVPLLRLAVAVCLTMSVLLFLERMYMAVVISGVKILRRRPDRRYRCDPIPDDDPELGTSAFPVVLIQIPMFNEREVYQLSIGAVCGLSWPSDRLVVQVLDDSTDPVIKEMVRIECERWAHKGVNITYQIRENRKGYKAGALKEGMKHGYVRECEYVAIFDADFQPDPDFLRRTIPFLVHNSDIALVQARWRFVNADECLMTRMQEMSLDYHFTVEQEVSSSVCAFFGFNGTAGVWRVSAVNEAGGWKDRTTVEDMDLAIRASLKGWKFVYLGDVQVKSELPSTFKAFRFQQHRWSCGPANLFRKMLMEIVRNKKVTIWKKIHVIYNFFLIRKIIAHIVTFAFYCLIIPATIFVPEVRIPKWGCVYIPTIITLLNSVGTPRSFHLLFFWILFENVMSLHRTKATLIGLLEAGRANEWVVTEKLGNALKMKSSSKSSAKKSFMRVWDRLNVTELGVAAFLFSCGWYDLAFGKDHFFIYLFFQGAAFFIVGIGYVGTIVPQS

SEQ ID NO: 55585 - protein, 829 aa, Oryza sativa
MWLWGMSVVCELWFGLSWLLDQLPKLCPVNRATDLAVLKDKFETPTPSNPNGRSDLPGLDIFVSTADPEKEPPLVTANTILSILAADYPVEKLSCYVSDDGGALLTFEAMAEAASFANMWVPFCRKHDIEPRNPESYFNLKRDPYKNKVRSDFVKDRRRVKREYDEFKVRINSLPDSIRRRSDAYHAREEIKAMKRQREAALDDVVEAVKIPKATWMADGTHWPGTWIQPSAEHARGDHAGIIQVMLKPPSDDPLYGTSGEEGRPLDFTEVDIRLPMLVYVSREKRPGYDHNKKAGAMNALVRSSAVMSNGPFILNLDCDHYVYNSQAFREGMCFMMDRGGDRIGYVQFPQRFEGIDPSDRYANHNTVFFDVNMRALDGIMGPVYVGTGCLFRRIALYGFDPPRSKEHSGCCSCCFPQRRKVKTSTVASEERQALRMADFDDEEMNMSQFPKKFGNSNFLINSIPIAEFQGRPLADHPGVKNGRPPGALTVPRDLLDASTVAEAISVISCWYEDKTEWGQRVGWIYGSVTEDVVTGYRMHNRGWKSVYCVTKRDAFRGTAPINLTDRLHQVLRWATGSVEIFFSRNNALLASRKMKFLQRIAYLNVGIYPFTSIFLIVYCFLPALSLFSGQFIVRTLNVTFLTYLLVITLTMCMLAVLEIKWSGISLEEWWRNEQFWLIGGTSAHLAAVLQGLLKVIAGIEISFTLTSKSGGDEADDEFADLYIVKWTSLMIPPIVIMMVNLIAIAVGFSRTIYSEIPQWSKLLGGVFFSFWVLAHLYPFAKGLMGRRGRTPTIVFVWSGLLAITISLLWVAINPPSQNSQIGGSFTFP

SEQ ID NO: 55586 - protein, 192 aa, Oryza sativa
MPSSSRTETVKNALSRWARRVGETTRKAEDLSRNTWQHLRTAPSIGEAAVGRIAQGTKVLAEGGHDRIFRQAFSAPPDEQLRKSYACYLSTSAGPVMGILYLSTARVAFCSDSPLSYEAGGGSKEWSYYKVAIPLHRLRSASPSASKQRPAEKFIQLVSVDRHEFWLMGFVNYDSAVKHLQEALSGFHHLQA

SEQ ID NO: 55587 - protein, 583 aa, Oryza sativa
MRRLLLAGILRRASSSPSSHHHLHLVRALSASSPLPASDADLRKYAGYALLLLGCGAATYYSFPLPPDALHKKAVPFKYAPLPDDLHAVSNWSATHEVHTRVLLQPDSLPALHDALAAAHGECRKLRPLGSGLSPNGLALSRAGMVNLALMDKVLGVDAKKKTVTVQAGIRVAELVDALREHGLTLQNFASIREQQVGGIIQVGAHGTGARLPPIDEQVISMKLVTPAKGTIELSREKDPDLFYLARCGLGGLGVVAEVTLQCVERHQLIEHTFVSNADEVKKNHKKWLSENKHIKYLWIPYTDTVVVVQCNPPSRWRTPKFTSKYGKDEAIQHVRDLYHESLKKYRTKAESNDPEVDQLSFTELRDRLLTLDPLDKDHVIRINKAEAEYWKKSEGYRMGWSDEILGFDCGGQQWVSETCFPAGTLAKPNMKDLDYIEELLQLIEKEDIPAPAPIEQRWTACSRSPMSPASSSQEDDIFSWVGIIMYLPTSDARQRKEITEEFFNYRSKTQTNLWDGYSAYEHWAKIEVPKDKDELAELQARLRKRFPVDAYNKARMELDPNKVLSNAKLEKLFPVTEVQHEK

SEQ ID NO: 55588 - protein, 210 aa, Oryza sativa
MTQLLAVACLSLAAKMEETDVPQSLDLQVGEERYVFEAKTIQRMELLVLSTLKWRMQAVTPFSYVDYFLRELNGGDPPSGRSALLSSELILCIARGTECLGFRPSEIAAAVAAAVVGEEHAAFSHVNKERMSHCQEVIQAMELIHPKPSSPSRVFVSSSIPRSPTGVLDAAGCLSYRSDDSAVASHYAASSWGYEHDSSPVSSKRRKISR

SEQ ID NO: 55589 - protein, 295 aa, Oryza sativa
MAPKAAVKKADGKTQQALKVAKAVKSGSIKRKSKKIRTSVTFHRPKTLKKARDPKYPRVSAPGRNKLDQYQILKYPLTTESAMKKIEDNNTLVFIVDLKADKKKIKAAVKKMYDIQAKKVNTLIRPDGKKKAPSRSRSSPASPRCSPSTSTPPPRSARASSSTTPRASSSERPPSSATTSPSSTTSRWAGQARPWATGTPRSATASSLAPARRSSAMSGSAPGPRSGPGRWCSSTCRRGPRRWGIRRGCSAGRRATTCRVNPWTTHPSSSNGRTTASEQDMVYALLNFLLVSSCA

SEQ ID NO: 55590 - protein, 710 aa, Oryza sativa
MGRKDTSSSSSAAGGKKDKPMSVSAILASMDAPASKAKPSKAASKPKPSKAPASSYMGDIDLPPSDEEEDDADLVAMATKPKAARATVDLNAIAPSQKDAKKKDKREAMAAAQAEAAKQEALRDDRDAFSVVIGARVAGSAGASEGDSAAADDNIKDIVLENFSVSARGKELLKNASLRISHGRRYGLVGPNGMGKSTLLKLLSWRQVPVPRSIDVLLVEQEIIGDNRSALEAVVAADEELAALRAEQAKLEASNDADDNERLAEVYEKLNLRDSDAARARASKILAGLGFDQAMQARSTKSFSGGWRMRISLARALFMQPTLLLLDEPTNHLDLRAVLWLEQYLCSQWKKTLIVVSHDRDFLNTVCNEIIHLHDKNLHVYRGNFDDFESGYEQKRKEMNRKFEVFEKQMKAAKKTGSKAAQDKVKGQALSKANKEAAKSKGKGKNVANDDDDMKPADLPQKWLDYKVEFHFPEPTLLTPPLLQLIEVGFSYPNRPDFKLSGVDVGIDMGTRVAIVGPNGAGKSTLLNLLAGDLTPTKGEVRRSQKLRIGRYSQHFVDLLTMEENAVQYLLRLHPDQEGMSKAEAVRAKLGKFGLPGHNHLTPIVKLSGGQKARVVFTSISMSHPHILLLDEPTNHLDMQSIDALADALDEFTGGVVLVSHDSRLISRVCDDEQRSEIWVVEDGTVNKFDGTFEDYKDELLEEIKKEVEE

SEQ ID NO: 55591 - protein, 314 aa, Oryza sativa; identical to SEQ ID NO: 40442

SEQ ID NO: 55592 - protein, 802 aa, Oryza sativa
MQRQAGGFISMAWSMPPLALFAAVLALQQAIAAAAAAGDCPTTCGDVAVPFPFGIGAGCYHLPGFNLTCDRSSDPPRLLLGDAAAFQVLNVSIVNATVRAARVGGINITYGGGNTSSADEGRGAWRGLGDGGPFALSEDRNELVVVWGCDVVALLTDGGGSGNSSNVTISGCASFCPGTDAGGQAIAAPAGSTMSLTEDRRCTGVGCCQMPISVGRDSYQVRLRRLNPSPPQPPPPQGAGDPTVVLIAEQGWVAEASRSTRGYPLPVTFDETAVPVLLGWMIASTRVGADGEVPVDSTCPADAARSACKSSHSSCRNVSSSARAGYVCDCDAGFHGNPYLATGCQDINECERAEEHGCFGECINTAGSFLCRCPAGMQGNYTQRNGCFRPPLPARSSTGLSIGVGVSSAASLILIVIMAIFIIRKQKRRRAKKIRQKYFKQNRGQLLQQLVAQRADIAERMIIPLGELKKATNNFDRARELGGGGHGTVYKGILSDLHVVAIKKSKIAVQREIDEFINEVAILSQINHRNVVKLFGCCLETEVPLLVYEFVSNGTLYSHLHVSGPRSLPWSDRLRIATETAKAIAYLHSSVSIPIIHRDIKSTNILLDDTLTSKVSDFGASRCIPVDQTGVTTKVQGTLGYMDPAYYYTQRLTEKSDVYSFGVILVELLTRKKPFSHLTPEGEGLVAHFVTSFTEGNLVGVLDLQIMEEADMKVVEVVATLAVTCVNLRGEDRPTMRQVEMALEGIQASRENVSGNLSAEKLGESNNVARDFMPSQEGRSMTEGTRQYSLEEEFLLSSRYPR

SEQ ID NO: 55593 - protein, 254 aa, Oryza sativa; identical to SEQ ID NO: 37957

SEQ ID NO: 55594 - protein, 669 aa, Oryza sativa
MKPFRLLHSALLLLQPNPSLSPSPPSRQVSAMREPRRPLLPLPLPHLLLVSLLSSSAAAPGAGAGAPPRTGGGGVARSIADMAWPTKCTWLPWPTCGKSHSYTLVSKYHKIWKDTKEAVSTKDVSRKEPITGVIALKASMKYFDADFFNDSKLREMEDGAKEFNVPAFRDNRKLVALENGGLHNPSALVFKSSWSDESKISENKSFQYPHTSSVHRPSKDEDIAFMSIIELGELIRTKQVTSRELTAVFLRRLKRYGPIIESVITITDDLAYKQAKEADDLLEQGKYLGPLHGIPYGLKDIIAVPEYKTTWGSRTFENQILDVEASVYKRLKSTGAVLVAKLVTGSLAYDDIWFGGRTRNPWNIEEFSTGSSAGPAASTSAGMVPFAIGSETAGSITYPAARCGVTALRTTFGTVARTGVMSISESLDKLGPFCRSAIDCAVVLDAIRGKDAGDPSSREVAIEDPFHVDIRQLTVGYLDSAEMEVVHVLSAKGVKLVPFKLNYTVQSVQSILNITMDVDMLAHFDNWQRERHDDDYEAQYQWPVELRRARLIPAVDYIQAQRARGKLIREVRESFTVDAFIGNVTDWELVCLGNLVGMPVAVVPTGLKGIKNPPEGGTRRRTTVTTGIYAPPDHDHVALALAMAYQSVTDHHKQRPAIDDLGPGDDIQR

SEQ ID NO: 55595 - protein, 518 aa, Oryza sativa
MSMPSSRQAMGEINIEAMARPVSVDHRISIAYYFRIADNLLRQANIYREEKNLVDLYIILLRYSSLLCETIPKHRDYHAFKLREKEFLKKGPHNSDKLLNVVNELETLKPVVLRQIADLNRGVTQEPNSQSGTSAAISQMDHLTQSSCFTQPLVGSPTGLLKMPFSGGKHQVEPTQSGRPDSQLVKSYGNLPYPKEETLSRHSVLGPNGLHGKWTAPVTGIRIQYPSNAELTKSDVSSLVPSILNQDLLYGPSRSQDFPTNKNEDMQSVLSLDDGQLSLPVEEATSVSPGFEEEFSQLNIRQPSPPPVMAQVHPQHRAISTSTVADLGPGIASSSTGRYQNLHVPVTLMECFLRVAEANTANNLETCGILAGTLKKRTFYVTTLIIPKQRSTSDSCQATNEEEIFEVQDKGSLFTLGWIHTHPTQTCFLSSIDLHNHYSYQVMLPEAIAIVMAPTDTTRKHGIFHLTDPGGMGVIHDCQESGFHPHEEPLDGTSIYEHCSHVYMNPNVKFDMVDLREL

SEQ ID NO: 55596 - protein, 510 aa, Oryza sativa
MGEVVSSALVHETVNKIISGMIDKYERKSSAQEHMDRLEMAQIKLDLALETSKKWQIISEPLLRWQKKLKRVAEECDDTIRMCRQRVQEEQEAKQVARDSFFPRRIAHATKSLISSIFYGNIDEPTRSTVRRFEWFADGANDFLRSVESGGTPRRYLFFDPLIGHLLAGEMLEYKLVQGNKQHLFWIRPNNIAERIEGMVFFVYNDGTAPEDNFFLGMILQISESTNIVGTIIKCLQLFAPHFESVTETVRKELTLLPTQDFSWIPHSRLYHWDNLHSIATEWFRPNPVCCKHHDQKVCGSGNMNMIELPDFSLESVIQVNLQCHVALPGFRERGTIVEGKSSLKEYLRGPHLNVLLAYTPHGSSESLFPSVEGSVIEVINANEQHCLHTNIALQQMEEIMLPRAVDYFHQNAKATVYQMLWKPKHGVAYLHAVKATVNILSTRRTIRGARKSKLLRQQDHKMHHRTDGISDFLSLWAAHAPVQLQGSILDWVQKEKEVQLAAPLLRLKF

SEQ ID NO: 55597 - protein, 641 aa, Oryza sativa
MACLAISLQPVNGPDILLQTRSWFPVSRALAAVSSFRLARLHLARGKQQQLSSSSSAAAAAATLEAIGDDPLAAGSGQLVVGVESQYRVVYRLVNSIYVLGVTTSSDHASPAVHAFAVADAVNQAVSVVVAACRGVDVTPEKVHRKYPEVYLALDLVLQGVGSVRLSQILATIHGDNLARMVNSSPDAEAKARGADPWPAVEHLAHDRHAARDGFTGASFELPQETLAAGDEFSASNIAPAASAATGDEPPPEEAAPVEKDPFAASELVNNSEEALVGGFKKNKETAIVVADPAAALAGLEVTTLPPAEATKPTFIGVEGFEGDYGGIEFGNEEASLAEAFEGFNAPFGGGLDASEFVTTTKKDHKDKSITGLELLATSAGQGPNAPGGTPLENLLVTKSTEMTAPELYIVEEVNAEFKESILARVGLKGTIFLRTLPPKKAAGKETEFSFRLEGTSGMKKAALQSTVLSNLENGMFHVRTPSKEEPIPIMKYSFLPKHSPLPLRMRLVKRHSGTLLSVMIQYASNPMLPQPLSNVTFIVKLPVDPTLLNVSPKAVLNRAERELRWHIPDIPLKGPAGRLRARMPVDQDSKDGELEVVGMVKFAYQGPFTLSGIKLCPATDGTAQFNEAGHTFSSGSYLCI

SEQ ID NO: 55598 - protein, 343 aa, Oryza sativa
MDGEMFGSGHWGGSFPYASIPKESQFVFDAKASPLQLQLFGSAAVPAVGSTGYYNYIANNHLSAMNQERNTNNDVGHEKQLNLQMSLNYFPVENLDRLARIGNPSAVSTGLRLSYENNEHTSITSGSGNMSSLPIMASFVDEVMAELDKENKEFNCYFGLQVEQLVKCMKDVKQRQMVEFLASLERGVGKKLKEKELEVEAMNRKSKELNEQIRQVALEVQSWQSVALHNQSVANSMKSKLMQMVAHSSNLTREGSGDSEVDNTASSQNVNAVPGVFFQSGLLGINSMADGGLGACRLCRMKEAAVLVMPCRHLCLCADCEKNADVCPVCRFPKSCSVEINMS

SEQ ID NO: 55599 - protein, 543 aa, Oryza sativa
MASAAEAVEELTRLYRELPPRPAVEEVEAAEAVLASADAEEAARLDEVAREEASASASSSAAAPGRADGELLAVLREARRNAVRLRALQQRKEAAYVVELERRFKVFDDLIQRASRVVSSSSDAAEAGGGTTGDGYVGVGADSVDLEMELRKKEAAVAAAAAVAEMERGSKGLAALGLESKPISSLRRDVSAGTDMEKLSLIQVASLIESSAKKGITELSLRGKLVDQIEWLPVSLGKLQDVTELDLSENRIMALPSTIGSLRYLTKLDLHSNQLINLPDAFGELSNLIDLDLHANQLKSLPSSFGNLTSLANLDLSSNMLKALPDCLGKLANLRRLIVETNELEELPYTIGSCTSLVELRLDFNQLKALPEAIGKLEKLEILTLHYNRIKGLPTTVGSLSRLRELDVSFNEVEVIPENICFATSLVKLNLSRNFADLRALPKSIGNLEMLEELDISSNQIRVLPDSFRCLSRLRVFHADETPLEFPPREVVKLGAQAVVKYMNDLNAARGTNQKKTDRGSFWTWLFSLFGCCKKNQEVGLPV

SEQ ID NO: 55600 - protein, 398 aa, Oryza sativa
MDATEFLSPQMGTEDLLLLHAYWAKLERTLGNDLAAARGVWENTLKKSGSVLEVWQHYIAMEIETEHIHEARSLYKRCYTKRFSGSGSEEICHAWIRFERECGTLEDYDLAVKKVNPRLKELMMFKAQQEVKVDTHVVPKETTGSDFSQKRKSSKIPTKQQPPAKKKKDNPPKSAVLSDDHGSKEQISTGHVKTGEVSGEKTQASMEVNLVDGSRRENTASKESKSNFYSDKCTAYMSNIDLTANEEHIRRFFPDIGGVTAIRLLRDKFTKKSRGIAYVDFSDNEHLEAAIRKNKHKLLAKKVSVARSDPSKGKKNREAGSFSKDQATSGDRGETAEFANRPDKEIPKDKPTITGKNTFAAPRSVVKPLGWTQKDEKSDVGAEELKSNEEFRNLLLKK

SEQ ID NO: 55601 - protein, 706 aa, Oryza sativa
MTGGGAGGGGGGGKGGAAAGPVPAASRKLVQSLKEIVNRPEAEIYAALRDCGMDPDEAVSRLLSQDTFQEVKSKRDKKKEVKEIPEPRSRAASNAASRGVRGGADRGGRNSSFHSSSIDNVASRSISGPGMTSTNSTQKQTIPSSLVNKSVVADGPSVPAQSSSGFQHGWSGTPGQLSMADIVKMGRPQVKQSSSKPAVTADKGYTGQYPSLPSTVNQNLKQSASTVSPTNPDQGLHSAQDSIHPKDHNHSAAVNKQAYDNDWLPQDEPPPGNQSALPETSGDQSLYESSLQSSTLVAGVINPHENSHLDENRSAAFSSERHLEHHGGDSEYDDGLLQESSTYLPQKNSHAEDEVEGSNSDVALATENFQGLSLHNEELVPTKLAEDNPAVIIPDHLQVTGSDCVTLSFGSFESGAFSGLLPVPSRSADDNNVELPVIEESVPLDQIDSRDQDYYDSAAVNSSGNENLDTIIGTNMENIDVPSVSQPDVLRQEVLDHSGLQYNLPSDSSAAYANTTQPSTMESSQGNNQAHTLSHLSNLLQANSLHNSLLGSNIAPLRDLDFSLSPLLAAQSMTKYNSAAPTTTGPAISMQETLKPGVFSNAQSTQNLPSTSIATGPPLPQQLVHPYSQPTVPLAPFANMIGYPYLAQNYPAAYLPSAAFQQAYSSNGPFHQSAAAAVPGAMKYNMNVPQFKNNLWLQAYNSNLLQ

SEQ ID NO: 55602 - protein, 412 aa, Oryza sativa
MASAVASNLPAAAPAAVMPFGGWHGPRVSFSRDAAGAEEAAAVVVCSSPLAAAAAVATTTTPEPAISKDFIDFEFSLGGSATMLPADELFADGKLLPLRKAAAVPEMDAAAPRPPQPEAMPAPSEPMKPLRAATAAVDAADPYVFSPKAPSCSSRWRKLLGLKRAAAQSPKPSPSSAPARTPGRAMNSTAARSLKLLLQRNNGRSSGASASELASAPLLRDSSDSEASLSLASSRFSLSSSSSSSGHDHDDIPRLSLDSAADPNPPRIRLVRSSHRHSTSSSSSSRAGRSPARRRPSPPPPPRCLSVDSPRMNSSGKIVFQGLERSSSSPCTLHAAAKPRSRAVDRSYSSGVRVAPVVLNVPVCSRPVFGFFKDKKDAAAKDAMAARTRSSLGRKTTAAPQGWSGELGRSCG

SEQ ID NO: 55603 - protein, 220 aa, Oryza sativa
MAGTRRAEEEYDYLFKVVLIGDSGVGKSNLLSRFTRNEFCLESKSTIGVEFATRTLHVEGKIIKAQIWDTAGQERYRAITSAYYRGALGAVLVYDVSKPTTFDNISRWLKELRDHADANIRIMLVGNKTDLKHLRAVATDDAHKFAEAEGLSYIETSALEATNVEEAFQLILGDIYRAISKKPVASDEGGAGAAGGVKEGKTINVAAGDANSEKKQCCST

SEQ ID NO: 55604 - protein, 276 aa, Oryza sativa
MARQEAARLGAGEADAGGARHDPWLRRQDRPRAEGEGRGGAGAQGRLPVALRRDRQAQRREPPRRGTNFVLAGRDTTSSALTWFFWLVSGQPDVEDRIAREIRAVRASSGSTDAAAFSFDELREMHYLHAAITEAMRLYPPVAMDSHCCQNDDVLPDGTFVGKGWQVTYSAYAMARLEELWGADCEEFRPERWLDEDGVFRPESPFKYPVFHGGPRMCLGKEMAYIQMKSIAACVFERFSFRFVGGEGRPGLVFSVTLRMEGGLPMRVKKRRDSVC

SEQ ID NO: 55605 - protein, 549 aa, Oryza sativa
MGRPHRRRDCGHGAAHRERCRIQSKQLHSTVPTPPARRLPPHAILYHHHHHRVVLAHTPYRPPPSTAAMAGASSYFSLRRLLLLLLPLVPLLGATTAAAAGANSSVTYDHRSLIISGRRRLLISTSIHYPRSVPEMWPKLVAEAKDGGADCVETYVFWNGHEPAQGQYYFEERFDLVRFAKIVKDAGLYMILRIGPFVAAEWTFGGVPVWLHYAPGTVFRTNNEPFKSHMKRFTTYIVDMMKKEQFFASQGGHIILAQVENEYGDMEQAYGAGAKPYAMWAASMALAQNTGVPWIMCQQYDAPDPVINTCNSFYCDQFKPNSPTKPKFWTENWPGWFQTFGESNPHRPPEDVAFSVARFFGKGGSLQNYYVYHGGTNFGRTTGGPFITTSYDYDAPIDEYGLRRLPKWAHLRDLHKSIKLGEHTLLYGNSSFVSLGPQQEADVYTDQSGGCVAFLSNVDSEKDKVVTFQSRSYDLPAWSVSILPDCKNVAFNTAKVRSQTLMMDMVPANLESSKVDGWSIFREKYGIWGNIDLVRNGFVDHINTNKRLY

SEQ ID NO: 55606 - protein, 253 aa, Oryza sativa
MSGGVAAAVGGGAPEENGAPPNVTIYINNLNEKIKLEELKKSLRAVFSQFGKILDVLAFKTLKHKGQAWVVFEDVASATEALKSMQDFPFHNKPMRIQYAKTKSDIIAKADGTFVPRERRKRNDEKPGKKQKREQHHDVSQVGLGVNAYPGVYGAPPLSQLPFAGAQKVMMPEIIVPNNILFVQNLPHETTPMMLQMLFCQYPGFKEVRMVEAKPGIAFVEYGDEGQATAAMNHLQGFKITKDNQMLISYAKK

SEQ ID NO: 55607 - protein, 381 aa, Oryza sativa; identical to SEQ ID NO: 36741

SEQ ID NO: 55608 - protein, 182 aa, Oryza sativa
MGDHGRRRQAAAPLLEKKGSTGTGVDDGYCIEGCPGCVVDRRKAASYGIPYGSFLFVWIVTLCTALPISSLFPFLYFMIRDLHVAKRTEDIGFYAGFVGASFMFGRCLTSTVWGIAADRIGRKPVVVFGIFAVVIFNTLFGLSFTYWMAIATRFLLGALNGLLGPIKAYAIEVCRPEHEALA

SEQ ID NO: 55609 - protein, 183 aa, Oryza sativa
MAMAMAASLAAHHHLAGGGLLPTPRASGRNGRSGITISMRAQRKQSGDSGSGKGDGGDGRVSGRRRVWRRRKLTKEDDMLRCKLERVPFLEEKVRKVRENGKIICLDINQLMLSEENRFAFTIEVAEEANSYLEKNRHEYGLKKPILHVLSDRMNEAGFSRPEGYLYPYPIKPGPYFIKEEGH

SEQ ID NO: 55610 - protein, 651 aa, Oryza sativa
MLLEPFLLHLAHASQHILDALSFIQRAGFSSPTPIQAQSWPIALQCQDVVAIAKTGSGKTLGYLLPGFMHIKRLQNNPRSGPTVLVLAPTRELATQILEEAVKFGRSSRISSTCLYGGAPKGPQLRDLDRGVDVVVATPGRLNDILEMRRISLKQVSYLVLDEADRMLDMGFEPQIRKIVKEIPPRRQTLMYTATWPKEVRRIAEDLLVHPVQVTIGSVDELVANSAITQNVELITPSEKLRRLEQILRSQDSGSKVLIFCTTKRMCDQLARTLTRQFGASAIHGDKSQSEREKVLSHFRSGRSPILVATDVAARGLDIKDIRVVINYDFPTGIEDYVHRIGRTGRAGATGVAYTFFCDQDSKYAADLIKTLEGANQRVPRDLADMASRGGRGGRKRNRWATRSDRGGSHSELDSRYGGRDGLSGSSGRLDSSRSSRRHDYGDDGRSRRSGRGRSRSRSRSDSDRYSRSPKRSRRHSRSRTRSRSRSRSRSYTRNRRASRSRSRSPGASRRHERSATGSGSALPDSGHGERKRTPEADPSRNHTNHSDPKDDRHPEDGKVGKVDLDRSPTPQDKSGPYSPAYNGKTSRSVSPGNQVEGNNKAAEVSKNPDPSSPPHHGKTREDEEEGMIDEDGEIADDPRANATVQNGGDN

SEQ ID NO: 55611 - protein, 208 aa, Oryza sativa; identical to SEQ ID NO: 29728

SEQ ID NO: 55612 - protein, 477 aa, Oryza sativa
MATDANPEAAAPPPQLLVDEGYEFCAPKFFDFVCDETEEEIRAAERWFEASASHAPSPFAPRIKESRAEVKIESLCDFTDAEPIPKEVAVEEAAGSAANPSQNSDGNVQQNKDGSIKLVHEANPSENCVTDGDHKHQESDAMLESPPAEEDEKESPKSFEFVPSNAKSDVASSTPKIQRPPPVKAVTTVPTCPKLTVKTEAFTPKVQATNSSRGLAPLTGSRAHPSALKQSMSVKRSVIKCPRELLAGKAATAANEIAQENQAVKRQKLDDGRTRQILNVKTRTLPHKGRGGGLAGSTEMSLSAMRKHRDDSHSLKEVTHYISAAEMVKKFESGTRELAIPHNRSLSHEDAATALQRRTKLMLTRPKEPEFQTSHRVRAVRVKSSAELEEEMLAQIPKFRARPFNQKIAEAPSFPPLPRKAPQLPEFNEFHLKTMERATRHADTCSEASSVGTIRVSSLHLTWLLISVCKFFFLLVS

SEQ ID NO: 55613 - protein, 367 aa, Oryza sativa
MLSGVKFIPREQIGEDALGGAGSAGSDSSEDRRRRKKRGRKGRDKEERRDRRRRRRRSKYGSDSEEGSDSGDSIEEEEEKGLSRSKHRRKHQRRRHEFSDDDDDDNEESSGESDKRRGSRKSKLGGAAGDDDDEEEEDEGIGGEELRASDIVRKEMGLEWMLKSASSGRAESSQAGGADKDEEEVAPEEVKKANPKELNPYLRDNGSGYPDESSPSNAGNQLLASSVVGDGGASWRLKALKRAKEQAAREGKQLEEVVGERWGSLGHLAASVSASRAAPSHAHLHAIRGRKAGPAGSSEEHSKENPKEGQQGGDSGRREYLKDVSSRHHAMRKPKPDSVPWKRNRQNISSEDQALISSAIAGINKVL

SEQ ID NO: 55614 - protein, 250 aa, Oryza sativa
MSPPADTAALASTSGAPLAPLVAAQLNFVLSQANLPIRVGQIWSGCRDGRYADRFTLAIPFCLDYVYWDFLYNALSPKVAPDVVFGPDDEGFQPLVDFDETGSGEKSCLANWDCRDTSALLSLIKELREFYIEYQKKRAAEVDDARLKFEISTVLSKEGIEVCTVSSNGRPDEVKFAVPLLDLDLAKLVPGCPWKLPQKIHLQAVFPISRSYSSVPSAPRLKLVSTPDLKSFFSVDDVKLPPWVRWNVHG

SEQ ID NO: 55615 - protein, 272 aa, Oryza sativa
MYANNCPLHTPPRSGKCIARFLGRFSFQPLHENPLLGPSSATLQKMGALVWDKVVHEHQGYRLITSIWLHAGVLHLVANMLSLIFIGLRLEQQFGYVRIGAIYLLSGLGGSVLSSLFIRNHISVGASGALFGLLGAMLSELLTNWTIYTNKVAAVITLLFVIAVNLALGILPHVNNFAHIGGFLTGFLLGFVLLMRPHFGWMERYSLPSGSPCSSKKYLVYQWILLAIATALVIVGFAVGMTMLFRGENANDSCHWCHYLSCVPTSRWTCSN

SEQ ID NO: 55616 - protein, 196 aa, Oryza sativa; identical to SEQ ID NO: 47598

SEQ ID NO: 55617 - protein, 170 aa, Oryza sativa; identical to SEQ ID NO: 29237

SEQ ID NO: 55618 - protein, 483 aa, Oryza sativa
MEQCTGGTQLQLEESTRRPLLDAMEKLGISQKEVKQVAWNFVNDWLKTTLCLQYKPQYIAAGSLYLAAKFQNVKLPVHGGHVWWHQFDVAPKPLEAVLQQMREMVHMKAKLFAHPSPAKQKEVLFEGMLLISNSPDSVLTQSSLSVSSSSPEIGDPNDHLQVDSSQDIVHIEDRSKSYPERNLSNLTADMNNPGKTHNKESLDQALKIKHGGLISCNQQIPLDAIAKIDSSTAKCVEQNIGICCSSSNTFNGKILNPFSISQRSGDKTKLCSEGGSSLTDVDSKSTQSVEPPTTICNHTSDSLNVDSLCSDQRLANSTAGTTEKASFVLPVQIKVDHLCVERKKVDVARIKDLLMKRKRRRERQGRCIPSVDLSEEAWIERELESGIVFKKVDHVVASYDLSDEGWIERELESGIVIGQKNDQPVSLDGLTEDDWIERELESGIIVEPGPAGKKLKSKLLSEGHEIMNSRWEINGKSMQNQVT

SEQ ID NO: 55619 - protein, 547 aa, Oryza sativa
MASGSSGGGYADEKGPGAATMQALGLQQQHGGGGEVEEESSEMGEKTAARTRLSGLLWHGGSAYDAWFSCASNQVAQVLLTLPYSFAQLGMASGLLFQLFYGLLGSWTAYLISILYLEYRTRKERDKVDFRNHVIQWFEVLDGLLGRHWRNVGLAFNCTFLLFGSVIQLIGCASNIYYINDHLDKRTWTYIFGACCATTVFIPSFHNYRIWSFLGLLMTTYTAWYIAVASLIHGQVEGVAHSGPTSIVLYFTGATNILYTFGGHAVTVEIMHAMWRPQKFKAIYLLATVYVLTLTLPSASAAYWAFGDALLTHSNALALLPRTPWRDAAVVLMLIHQFITFGFACTPLYFVWEKLVGLHGCPSLCKRAAARLPVVLPIWFLAIIFPFFGPINSAVGSLLVSFTVYIIPSLAYMVTFRSPQSRQNAVERPPRFAGGWTGAYVINSFVVAWVLVVGFGFGGWASITNFVHQVDTFGLFAKCYQCPPHPAAAALSPPGAIAPAPASMLPPFNSTAAGIFAAPVPSPAPAPAPMHFVLGHHHHHRHHRHGL

SEQ ID NO: 55620 - protein, 811 aa, Oryza sativa
MVGGGGYRQKLIQVWNDWQVSVLVLLSLTLQLLFLSTAGARRRAQPSWGKKTYFWALYIGSRFITTYSLGILSRASTGDANADIQAFWASLILFHLGGPDDFTALSLEDNKLWDRRCLELFIQVSTTLYVFSRYVLDPGFRRFIVPFALIFSAGVVKYVEQVVALHHATMEALIKSVLGKPDAGPDYADTINRLDGIMRSGALPSLDIKNERVDRPNSDPEANVQVKDYSEDEQVAIKTIRSAHSLFSRFSVLFADGIFSFEDRQESQAMFLRKDARWAFKIVEIELGFAYGRLYTKASVSRGARLAVRVCSLSLTLAAGLWAALAILRASQYRQRHRCVTYALLAGAALNDAAILAAHAFSVWSLVHGDWLSWCSVMLVKRRRWSASMAQSNLVTFCLRKLPSNNDSDPAPLSSSFLLRRLLLGGGRGGGVQQQDASPAPALSTTLASMDEFQKLFERRSLLDQVRSGSFWSKYKHTKYVPVSEKLKDFIYAQLEEKVRRLSEYDKRMERERERERKRVRAPSPSPSPSPSPSPSASATTPTQTGTSTTTTTSSMYSILTDCRGDQVMKKERISNLSWSLEKKEFDESLLIWHIATDLRFREEAQAAGAAASAASAATVDQRETRKHMEIARELSNYLYYIMVVHPLMLSSSTTMAIKRCRDTCAEARRLFLKDHVMAAAGKGKGDRRRAVGEDNAHRVLLDVDTPLHAAVVKGDKCKSVLWDGCFLARELRQSMADPGRRWRVVCEVWVEMLGYAAVHCGGYQHAERLKDGGELITFVCLLMTHLGMGKHYRTEVGDAYAHLSPYSAAA

SEQ ID NO: 55621 - protein, 81 aa, Oryza sativa
MFGDEQCTMSPRYSWEKWAAAFPGSKVYIGLVASPEQDSAWMFQKDLYYEMLQFVRSLPNYGGLAIYDRYFDKKANYTGEG

SEQ ID NO: 55622 - protein, 430 aa, Oryza sativa
MAAAAAARRGCLVALLAVLFLACAAEGGAAAASAAQQQQQLRRRRHLLRRQRQVHSHLRRLNKAPLASIESPDGDIIDCVHISNQPAFDHPFLKNHTIQMRPDYHPEGLYDESKVASQQNTQTITQMWHKNGVCPENTIPIRRTKKEDVLRASSIRRYGKKKQKSTPNPMSVDPDMLNESGHQHAIAYVEGDKYYGAKATINVWQPRIEQANEFSLSQLWILGGSFGQDLNSIEAGWQVSPDLYGDNNTRLFTYWTSDAYQATGCYNLLCSGFIQINNQIAMGASISPLSNYGGSQYDINILVWKDPKEGNWWLQFGNDYVLGYWPSFLFSYLADSASMIEWGGEVVNSEPDGSHTSTQMGSGHFPEEGFGKSSYFKNIQVVDSSNNLRAPSGIGSFTEQSNCYDVQNGNNGDWGTYFYYGGPGKNPNCP

SEQ ID NO: 55623 - protein, 672 aa, Oryza sativa
MSDDVANLVDNLRECLKQKRYIVVVDDIWNPEPWNFIGEALVKTSPGSIIILTTRVKEVAMSSSSSHGGFVYPMKHLDGAHSKRLFYKRIFDCEEQCPPEFEQASKEILERCDGIPLAIISISSFLADRQSLYHWNEVKKIISSPIPGNKDLETMQSVLALSYYNLPHDLRSCLLYLSAFPEDCEIGKTRLVSRLIAEGFIHARPGENLYEAGLRYFNVLINQSLIQPWNEHYGEVLSCPVHDVILNFIVSQSVEENFMTLLDPSGPVPLQHSNCCKVRRMSLQGSYCQEKFASSMKSIKPHVRSLACSMDCTGLHPLSEFKVARVLDLEGCESLTNNHLANIEKLAYLRYLSISGTGVSVLPANIGRLQHLETLDILDTQVKELPPSIVLLQQLVRLSVNSDVMFPAEGVSKMQALEQLTGLLPFNQPVSFLKELGELTKLRVLAVSWIPDHVRDSDEAHAEHEKSYEKIFISSLNALDRHSLPYLDLSLYYSYSDIAAKRFLFDSWFPSLKNLRRLSMVNRFKTTTIPSWIRLAAKLEKLELSKAYVTQDDLEMLGDLKALEYLALPFSDTQGSWLTISNHGFRCLKFAFLCNVLFMHDSMPNLKDLHIGIRLNVVGENDSFQHLPNTLCRVHAWISGNLDAVSKLKEKILNIANTHPNRPSLTTATYIQ

SEQ ID NO: 55624 - protein, 305 aa, Oryza sativa; identical to SEQ ID NO: 28606

SEQ ID NO: 55625 - protein, 238 aa, Oryza sativa
MQAVGIVASVGDSVNHIKVGSPVALMIFGAYSEFTQVPAKHLLPVPRPDPEVVAMLTSGLTASIALEKAGQMASGQVVLVTAAAGGTGQFAVQLAKLAGNKVVATCGGKCKAALLSSLGVDRVINYQNEKIKDVLKKEFPRGADIIYESVGGEMFDLCLNALAVHGRLIVIGMISQYQGEHGWKPRNYTGLCDKILAKSQTVAGFFLIQYAHLWQDHLDKLFDLYASGKLKVCLEPPM

SEQ ID NO: 55626 - protein, 420 aa, Oryza sativa
MCCFLLVSVLLATNLTDVASAQRWRQTSGGGKDRWDGLLDPLDADLRRDIIRYGELAQATSDALIGDPASPFAGASRYAPDAFLRKVRASDPDAYRVTRFVYATSSVRLPDAFMPRPAPSAGAAWSGESNWMGYVAVAADGVAAKAGRRDIVVAWRGTKRAVEWANDLDITLVPADGVVGPGPGWTQPSVHRGFLSVYTSKSFSSPFNKLSAREQVLAEITRLLRAYKNENCSITITGHSLGAALSTLNAIDIVANGYNVRGSSRVPVPVTAIALASPRVGDDQFKRAFDSTSNLSLLRVRNAPDIVPTILPSAFFKDVGAELLVDTRRSPYLKDPAGPAQWHNLECYLHAVAGTQGAGDGAGFSLVVDRDLALVNKEVDALRDEYQVPAAWWVEKNKGMVQNASGRWVLQDHEEGNLAM

SEQ ID NO: 55627 - protein, 671 aa, Oryza sativa
MAMATPMAPRSTFAIFLILLLRSGHSPAAAFYLPGSYPHRYRPGEALAAKVNSLTSPSSKLPFPYYSLPFCAPQGGVNRAAESLGELLLGDRIETSPYRFSMLKNATAFLCRTDPLPPATADLLMFRIDDAYHVNLLLDTLPVVRYVKNLAAPGVFVRSTGFPVGVRADDGEYYVYNHLKLTVLVNKPRNGTTRAEALMATADAVELISFAGGSKDGGGYTVVGFEVVPCSVEHDAAAIKGKKMYDELPARAAAGCDPSVVGMRVRANRPLVFSYEVAFVESGVEWPSRWDAYLEMGGAKVHWFSVLNSIVVVAFLAAILLVILLRTVRRDLAQYDEHGGEAGLAPQADELAGWKLVAGDVFREPAHPVLLCVMVGDGVRILAMAVATILFAALGFMSPASRGALVTGMLGIYLLLGFAAGYAAVRLWKTVRHGDSAGWKRVAWRASCAFPGAGFAVFTALNCVLWYNGSTGAVPFLLFAVILLLWAFVSVPLTLAGGLVASRVGHLEYPVKTNKIARQVPAAQCSPWVFVAVAGTLPFGTLFIELLFIMSSLWLGRVYYVFGFLLVVMALLVAVCGEVSVVLTYMGLCVEDWRWWWRAFFASGSVAAYTLGYAVYYLVFDLHSLSGPVSAALYVGYSLLMALAVMLATGAVGLAASFAFVYYLFSAIKLD

SEQ ID NO: 55628 - protein, 291 aa, Oryza sativa
METYSRMHVTEGTVLKLLCPNDKCGGIIPPSLLKRLLGDTDFERWERLILQKTLDSMSDLAYCPRCGAACLEDEENNAQCPKCFFSFCARCRDRRHIGEKCMTIEEKLNSLQDRTVVPFLSKDSFASKMNLSNEISSIKEVLRSSVRCPHCGTAISRVSGCNHMLCSNCRQSFCYGCGKAENHGHSSEPCRYQENLATKKNPTVLIEEVKKELEGGLSRQHPCPNCRQPNPKMGNNSHMFCWACQVHYCAQCHRMVRKSSEHYGPRGCKQHSVDPEIPLRFKANKNDDSGS

SEQ ID NO: 55629 - protein, 356 aa, Oryza sativa
MGDSTVAGALVPSVPKQEQAPSGDASTAALAVAGEGEEDAGARASAGGNGEAAADRDLLCPICMAVIKDAFLTACGHSFCYMCIVTHLSHKSDCPCCGNYLTKAQLYPNFLLDKVLKKMSARQIAKTASPIDQFRYALQQGNDMAVKELDSLMTLIAEKKRHMEQQESETNMQILLVFLHCLRKQKLEELNEIQTDLQYIKEDISAVERHRLELYRTKERYSMKLRMLLDEPAASKMWPSPMDKPSGLFPPNSRGPLSTSNPGGLQNKKLDLKGQISHQGFQRRDVLTCSDPPSAPIQSGNVIARKRRVQAQFNELQEYYLQRRRTGAQSRRLEERDIVTINKEGYHAGLEDFQSV

SEQ ID NO: 55630 - protein, 562 aa, Oryza sativa
MELAVGAGGMRRSASHTSLSESDDFDLSRLLNKPRINVERQRSFDDRSLSDVSYSGGGHGGTRGGFDGMYSPGGGLRSLVGTPASSALHSFEPHPIVGDAWEALRRSLVFFRGQPLGTIAAFDHASEEVLNYDQVFVRDFVPSALAFLMNGEPEIVRHFLLKTLLLQGWEKKVDRFKLGEGAMPASFKVLHDSKKGVDTLHADFGESAIGRVAPVDSGFWWIILLRAYTKSTGDLTLAETPECQKGMRLILSLCLSEGFDTFPTLLCADGCCMIDRRMGVYGYPIEIQALFFMALRCALQLLKHDNEGKEFVERIATRLHALSYHMRSYYWLDFQQLNDIYRYKTEEYSHTAVNKFNVIPDSIPDWLFDFMPCQGGFFIGNVSPARMDFRWFALGNMIAILSSLATPEQSTAIMDLIEERWEELIGEMPLKICYPAIENHEWRIVTGCDPKNTRWSYHNGGSWPVLLWLLTAACIKTGRPQIARRAIDLAERRLLKDGWPEYYDGKLGRYVGKQARKFQTWSIAGYLVAKMMLEDPSHLGMISLEEDKAMKPVLKRSASWTN

SEQ ID NO: 55631 - protein, 85 aa, Oryza sativa
MKLIGKQNYISIHVCSEHASLLIGSSYLVTRFFSCFTYTGIPISFWDSYKPVLCHQITTHHQTSLADCHWPSWMPKWNSVPNTIN

SEQ ID NO: 55632 - protein, 170 aa, Oryza sativa
MTGHCRHWPISSSTALQAKSLRHHVCLDEVNPFFPFPLSFSPHNKPPPPLLLLPRSSSCRRRFGLLLHFLRQPPHSPDALCSGTPPAAGVAIFQPPENRRPSSPSPLLLVLERGEKKEETGGRRRKRKRKDTDRWAPAQYYFAFLYLTQNPIFRSPYLLNCRSDSSEIWT

SEQ ID NO: 55633 - protein, 757 aa, Oryza sativa
MAMARRSASRLLSSFRPFSLLLQPLDDAPSLSAAAAAASARRGMSSASALRARDEKEVARWRESMDRMRNIGISAHIDSGKTTLTERVLYYTGRIHEIHEVRGRDGVGAKMDSMDLEREKGITIQSAATYCTWNGYQVNIIDTPGHVDFTIEVERALRVLDGAILVLCSVGGVQSQSITVDRQMRRYEIPRVAFINKLDRMGADPWKVLNQARSKLRHHNAAVQVPIGLEEEFEGLVDLVELKAYKFEGGSGQNVVASDVPSNMQDLVMEKRRELIEVVSEVDDQLAEAFLNDEPIQSNQLKAAIRRATVARKFIPVYMGSAFKNKGVQPLLDGVLDYLPCPMEVESYALDQNKSEEKVLLAGTPAEPLVALAFKLEEGRFGQLTYLRIYDGVIRKGDFIYNVNTGKKIKVPRLVRMHSNEMEDIQEAHAGQIVAVFGVDCASGDTFTDGSVKYTMTSMNVPEPVMSLAVSPISKDSGGQFSKALNRFQKEDPTFRVGLDPESGETIISGMGELHLDIYVERIRREYKVDAKVGKPRVNFRETITQRAEFDYLHKKQSGGQGQYGRVCGYIEPLPSESDGKFEFDNMIIGQAIPSNFIPAIEKGFKEACNSGSLIGHPVENIRIVLTDGASHAVDSSELAFKLASIYAFRQCYAAARPVILEPVMKVELKVPTEFQGTVTGDMNKRKGIIVGNDQEGDDTVVVCHVPLNNMFGYSTALRSMTQGKGEFSMEYLEHNTVSQDVQMQLVNTYKASRGTE

SEQ ID NO: 55634 - protein, 477 aa, Oryza sativa
MNKLSGRIPDTIGRIGHLQQLFLAQNNFSGPIPATLQNLTMLWKLDVSFNNLQGEVPDEGVFKNLTYASVAGNDNLCGGIPQLHLAPCPIIDASKNNKRWHKSLKIALPITGSILLLVSATVLIQFCRKLKRRQNSRATIPGTDEHYHRVSYYALARGSNEFSEANLLGKGSYGSVYRCTLEDEGAIVAVKVFNLRQSGSAKSFEVECEALRRVRHRCLIKIITCCSSINPQGHEFKALVFEYMPNGSLDGWLHPVSGNPTSSNTLSLSQRLGIAVDILDALDYLHNHCQPPIIHCDLKPSNILLAEDMSAKVGDFGISRILPESIVKALQHSDSIVGIRGSIGYIPPEYGEGSAVSRLGDIYSLGILLLEIFTGRSPTDDMFKDSVDLHKFASAAFPGRVLDIADRTIWLHEEAKNKDITDASITRSIVQDCLVSVLRLGISCSKQQAKDRMLLADAVSKMHAIRDEYLLSQVVKK

SEQ ID NO: 55635 - protein, 72 aa, Oryza sativa; identical to SEQ ID NO: 31001

SEQ ID NO: 55636 - protein, 636 aa, Oryza sativa
MAKEEDGGGGPEFVRWREDFVSQERGSRVVHYYLEDAAGASHLAVVGTERSLRHMLYVVSEDFREAQGADGGGPGVFARKWRSRREVVDWLASFLPAKSLASKLSKFGSHMGNDIGLDGYSEPDSFMGHNLGKACSSDIMWSGSSWTCGKQLYHYKAFCRNGTTISTHSFVLVMSEEESRYLAYLEDMYEDKKGQKKVKVRWFHQNQEFACAIPPPPPHPCEVFITPYSQVISVECVDDIATVLTPEHYEKCVNTLPNSSMVGIRFCFRQYSKNKFKRFDLRSLRGYFSQAVVLSLKLPPEQEKDDGSDIIKTFEQWTPGKTKFPKQFERLYSKCLGTKICRGPQEDSIASYQKPSSKQSPRKHLSVKFIGPQNQRMPTYNVGDRIEVLSQDSGIVGCWFRCTVLKSCTNHNKLKVQYDDLQNADDSGRLEEWVPVSTLARPDKLGLRCPERRRVRPRPQQNSLADGTNLLPGAAVDVWQFSGWWEGVLVSADNISADSLQIYFPGENFFSVCQLKNLRISKDWVKSHWVDIEMKPDVLSKIPSVGVQTRQPDNLTSVERPDSRNSAMSDQELAAIQTNSSEDKQTGADQPAEVSLTDMASAFAEDQKQTVLGKRPRDDDAEQHCNGEVGIDVGKL

SEQ ID NO: 55637 - protein, 619 aa, Oryza sativa
MSMYGRDPWGGPLEICHDSATDDDRSRNLDLDRGALSRTLDETQQSWLLAGPGDQGQKKKKYVDLGCLVVSRKLFVWTVGVLLAAAVFAGLVAGIAKAIPRHHRPPPPPDDFTVALRKALMFFNAQKSGKLPKNNNVHWRGNSCMKDGLSDPAVGRSLVGGYYDAGDAVKFNFPAAFSMTLLSWSVIEYSAKYEAVGELGHIRDTIKWGADYFLKTFNSTADTIDRVVMQVGSGATSPGSTQPNDHYCWMRPEDIDYPRPVVECHACSDLAAEMAASLAAASIVFKDNKAYSQKLVHGATTLFKFARQNRGRYSAGGSDAAKFYNSTSYWDEFVWGGSWMYLATGNSSYLQLATHPKLAKHAGAYWGGPDYGVFSWDNKLTGAQVLLSRLRLFLSPGYPYEEILRTFHNQTSIIMCSYLPIFKSFNRTKGGLIQLNHGRPQPLQYVVNAAFLASLYGDYLEAADTPGWYCGPHFYPIETLRNFARTQIEYILGKNPLKMSYVVGYGNRYPKRVHHRGASIPKNGVHYGCKGGWKWRETKKPNPNIIVGAMVAGPDRHDGFKDVRKNYNYTEATLAGNAGLVAALVALSGEGHGVDKNTMFSAVPPMFPSPPPPPAPWKP

SEQ ID NO: 55638 - protein, 490 aa, Oryza sativa
MLLFVQHPTPNREGRGAIDMVRAPAGADPPPFLQTRMDMAASSSSSSLSQSHSQSQTQAHKVEEEEHAADPPSPSRNASSKYDFVKVKVWLGENADHYYVLSRFLLCRMLTVTKIPNHVAIKIALELKKLLVDNSLLDVSQSDLEANLFKLMEKRGYGEDYINRYKMMTRFHHQRVPLVVLVCGTACTGKSTIATQLAGRLNLPNVLQTDMVYELLRTSTDAPLTSVPVWARDFDSPEELITEFCRECRVVRKGLAGDLKKAMKDGKPIIIEGIHLDPSIYFMDEEKRDDNSKMEKKVAECEQSPASVESKTERQQENELHEKRMDDSQECMSEEGGISEGLSCAKSHVISSSDSAYSKEKNPRAEDEGHKDLDLQKNNTTKKDKPAAEPIVVPIVLRMSDFDHKALLEEWTATRASRDNCLPQDHRKLINNLKLIQDYLCSFESQGLTVVDISANSFPQTLDWLHSYLLQCIERGLLAACSESPKQGGS

SEQ ID NO: 55639 - protein, 690 aa, Oryza sativa
MAYGLDHSEWLEVKYINNHALFVGYLSMAVKGVGFLVGLWTTVVLLGGFVSMLEKKDFWSLTIITLVQTAGVFDVLLNEKLRHAVNSVDGFLVTMDMVFRCEDEEFDSGIQLWRSRAGRLVTFIQAVVFAIILCPLAVLYLSGLVISTSLSLWRLIQHDYGDGDGSANLTPALNVLYSLALFQGVLFFYQWVSYFASFPEALSCISSLLDTTTTEQQEQQQQDGDSAPSAHYRDLMVLGRVILQKLAAAGEHNLFLIGKKQSTISKAMLPVRKDLLHIHNNGHVDAWKDIVTESLQLMSQLVSAPGKTGDDLRSHILTIHKDDIRVNNIIICKQCQSNKKLHMQAINIFTQQQHPMEALSTTSSNIDTTYSGTNIRLLVDIFLTNKDASTRKMAVGILAILLSDQNKSNANANATIIFKASDTVVRDLKTVLLDDEETEYRICAAEILEHLHRTKEASYLKKLMEAMQNVLPKILNEIFISLSPPKQGEKQAEKAEKGTDGTKTDPDIEEGAGAVASKDNVDVNDQKEDIGKKKKDRTRKLHAALLSLSVAIFEKRIRDGKDLDTLAGEIARGDSASSFVGKLRTMVDQNSEQTVNCLRILKIATRMIISLLKLEGCYPKQELENLMVSLSKASEQMFELEALMMLSSSDHTGKKTESFGSLVKEAEGLMKNKKEKNVATTPASTMNGNQ

SEQ ID NO: 55640 - protein, 251 aa, Oryza sativa
MGSKSYPTVSDEYLAAVGKAKRKLRGLIAEKNCAPLMLRLAWHSAGTFDVSSRTGGPFGTMKNPGEQSQAANAGLDIAVRLLDPIKDQLPTLSYADFYQLAGVVAVEVTGGPEVPFHPGRQDKPEPPPEGRLPDATQGSDHLRQVFSAQMGLSDKDIVALSGGHTLGRCHKERSGFEGAWTSNPLIFDNSYFTELVSGEKEGLLQLPSDKALMADPAFRPLVEKYAADEDAFFADYAEAHLKLSELGFAEE

SEQ ID NO: 55641 - protein, 193 aa, Oryza sativa; identical to SEQ ID NO: 32956

SEQ ID NO: 55642 - protein, 328 aa, Oryza sativa
MQGGRGRRDGFFGFGDPFPGLGSFGQPGSLMSSFFGGANPFDDPFFTNPFGAMMGPSLLQPSMFGSFGSSMFGPHGNVNGLSNTGGFLQQAPEPSRPRGPIIQELSSDDEDGADVNKEDEKRNDNPRKHPRMARMPYVEDPDEDTEDNKRSRHEQFERGYARASTSRPQPHTFMFQSSTVTYGGPNGACYTSSATRRTGGDGVTFEERKEADTTTGKATHRISRGIGNKGHSLTRKLSSDGNVDTMQTLHNLNEDELARFEESWQRNAVQNLSGWDPRVNMLGTGTARSGIRDGNQMLTLPAPGPGQSRGASSSRTKRPTQNTSSRRT

SEQ ID NO: 55643 - protein, 657 aa, Oryza sativa
MEQDLPALKPQWLVQGQVTTTGAANLWTVASPRPGPDNQGRGGSSRNHSSSGHHRDQNSRTSSSRISSNGPRKHDRDRDGMGKSRGYASFGRNREREREKEFDSRDRESRSITADGFGSFSTCRPERDRLNRSRSRTDSWNKGVVSPNNCNTSRNNTGTGGSFEREFPQLPFDDKRQDINRVPSPASPIQRTVAPDRWNSLLADVPGSSEPKKNLGVSSVLRPAPSKQPEAAPNSGISLSMAETVMQVPLSVGPQLSMEAQKMEEISLRQNTLRPMTSPAIKSSVTNSSKTKGVRNGDPSGPIKAHQSLIPSTNGSARAPVKTDLSKVSHAGNLKILTREQNCTIHTAKDCPDNPMSPPPAPVASVEPLKKPCVSQKLKVATHDIPLSILQSAYVDKKLNARDKHRFFESLRIKSSNGSSSTAESGCPSPSSVADVKQDSCLNVGKDVSLYHSGKDISLYHSGTKCMGNGKCSCEEANSSDGSQRHLSDNENNSSLDHTADGVSQNLLVESRSISSSEPSDRGDEFRVFLSNNTEGSSSSAPADSDDGYKRSQSGSEEASSSSETTEPGDEEHPAEDSLPADFVAFMISLGWEKDKKVEPLGLEEIAVTVRANEELEQKLLSMEDNANIKIVLLYIYSGRGLDKELMKPNAGDKNNA

SEQ ID NO: 55644 - protein, 192 aa, Oryza sativa
MSVSFPSFVAKESVSRLPLVGLISKCLGCIFVQRESKASDSKGVSGAVTERVQEAYQDKNSSMMLLFPEGTTTDGDYLLPFRTGAFLARVPVQPVILRYPYTMFSPAWDSMDGARHVFLLLCQFVNYIEVVRLPVYCPSEQEKEDPKLYANNVRKLIATEGNLIFSNLGLAEKRVYHAALNGNSRAIHQKDD

SEQ ID NO: 55645 - protein, 715 aa, Oryza sativa
MSGGAVAFLLLVAAAAVANAAVTYDRRSLTINGQRRILISGSIHYPRSTPEMWPDLIQKAKDGGLDVIQTYVFWNGHEPVQGQYYFSDRYDLVRFVKLVKQAGLYVNLRIGPYVCAEWNYGGFPVWLKYVPGISFRTDNGPFKAAMQTFVEKIVSMMKSEGLFEWQGGPIILAQVENEYGPMESVMGSGAKSYVDWAAKMAVATNAGVPWIMCKQDDAPDPVINTCNGFYCDDFTPNSKNKPSMWTEAWSGWFTAFGGTVPQRPVEDLAFAVARFIQKGGSFINYYMYHGGTNFDRTAGGPFIATSYDYDAPIDEYGLLRQPKWGHLTNLHKAIKQAETALVAGDPTVQNIGNYEKAYVFRSSSGDCAAFLSNFHTSAAARVAFNGRRYDLPAWSISVLPDCRTAVYNTATVTAASSPAKMNPAGGFTWQSYGEATNSLDETAFTKDGLVEQLSMTWDKSDYLWYTTYVNIDSGEQFLKSGQWPQLTVYSAGHSVQVFVNGQYFGNAYGGYDGPKLTYSGYVKMWQGSNKISILSSAVGLPNVGTHYETWNIGVLGPVTLSGLNEGKRDLSKQKWTYQIGLKGEKLGVHSVSGSSSVEWGGAAGKQPVTWHRAYFNAPAGGAPVALDLGSMGKGQAWVNGHLIGRYWSYKASGNCGGCSYAGTYSEKKCQANCGDASQRWYHVPRSWLNPSGNLVVLLEEFGGDLSGVTLMTRTT

SEQ ID NO: 55646 - protein, 220 aa, Oryza sativa
MGISRDSMHKRRATGGKQKAWRKKRKYELGRQPANTKLSSNKTVRRVRVRGGNVKWRALRLDTGNYSWGSEAVTRKTRILDVVYNASNNELVRTQTLVKSAIVQVDAAPFKQWYLTHYGVDIGRKKKAPAAKKDAEGQDAEATTEEAKKSNHVVRKLEKRQQGRTLDAHIEEQFGSGRLLACISSRPGQCGRADGYILEGKELEFYMKKLQRKKGKGASA

SEQ ID NO: 55647 - protein, 351 aa, Oryza sativa; identical to SEQ ID NO: 29478

SEQ ID NO: 55648 - protein, 444 aa, Oryza sativa
MAEPSKVIHIRNVGHEIAEADLLQLLQPFGNVSKIVMLRAKNQALLQMQDLHNSVSALQYYSTVQPSVRGRNVYMQFSSHQELTTDQNSHGRNSDQESEPNRILLVTIHHMMYPITVEVLHQVFKAYGYVEKIVTFQKSAGFQALIQYQSLQEAMDAFGALHGRNIYDGCCQLDIQYSNLSELQVHYNNDRSRDFTNPSLPTEQRPRASQQGYPDPGGLYAFQQPGASYAQMGRAAMITAAFGGTLPPGVTGTNERCTLIVSNLNTDKINEDKLFNLFSLYGNIVRIKILRNKPDHALVEMADGFQAELAVHYLKGAVLFAKKLEVNYSKYPNITSAPDAHDYTTSSLNRFNSNVIKNYRHCCAPTKMIHISALPQEITEDAILNHVSEHGSVVNTKLFEVNGKRQALIQFESEEEATEALVSKHATSLEGNTIRISFSQMQSI

SEQ ID NO: 55649 - protein, 396 aa, Oryza sativa
MPVEAAEEVVTGARPGKELSEQKASPASSLLPEKQVTPPLSPVAHSPPLAEAVVCTPDPELREVGGQESRSSGKKKVTFDMNVTAYENTAPADQEEEPPEPVSMVENEDGKHMQKDVLLPENHRYRNCSDSEEEEDEYGEDDNYGDDSDEEEEDFVDCKIDLVDKDELYTEDIKQESHESLFSLQMYKDQQNDNEVSSPAPKSSSTSVEEQSPLIQRNNHRDRGQYVRPVLNLVQNMSQWKGVKAQAAPAKKSNKENVNSVPKVGATPENSIKKEVSVDASLSTWLVSSDNSTVDKVQSGSPCSISTVNRDERPVLGALTVDDLKQSSATSSPRRSPSHNREEAILGTVGSYWSSTKQDNAHCSSRSDSGTNGIPNTTSKYREVHSTLKSYVSSDF

SEQ ID NO: 55650 - protein, 257 aa, Oryza sativa
MSPPLELDYIGLSPPVPAAADAAADNDLKGTELRLGLPGSHSPDRSPPAATLDLLPAAKGAKRGFSDEARPLPASAAAAAAAGKGKKAAAGEEDEDAEEEDKKVATAPQAPAAKAQVVGWPPIRSYRKNTMATNQLKSSKEDAEAKQGQGFLYVKVSMDGAPYLRKVDLKTYKNYKDLSTALEKMFIGFTTGKDGLSESRKDGEYVLTYEDKDGDWMLVGDVPWEMFANSCRRLRIMKGSDAIGLAPRAVDKSKNRN

SEQ ID NO: 55651 - protein, 487 aa, Oryza sativa
MAKDVEMAVRNGDGGGGGGYYATHPHGGAGGEDVDDDGKQRRTGNVWTASAHIITAVIGSGVLSLAWATAQLGWVVGPVTLMLFALITYYTSGLLADCYRTGDPVSGKRNYTYMDAVAAYLGGWQVWSCGVFQYVNLVGTAIGYTITASISAAAVHKANCYHKNGHDADCGVYDTTYMIVFGVVQIFFSMLPNFSDLSWLSILAAVMSFSYSTIAVGLSLARTISGATGKTTLTGVEVGVDVTSAQKIWLAFQALGDIAFAYSYSMILIEIQDTVKSPPAENKTMKKATLLGVSTTTAFYMLCGCLGYAAFGNAAPGNMLTGFGFYEPYWLIDFANVCIVVHLVGAYQVFCQPIFAAVETFAARRWPGSEFITRERPVVAGRSFSVNMFRLTWRTAFVVVSTVLAIVMPFFNDILGFLGAVGFWPLTVYYPVEMYIRQRRIQRYTSRWVALQTLSLLCFLVSLASAVASIEGVSESLKHYVPFKTKS

SEQ ID NO: 55652 - protein, 601 aa, Oryza sativa
MPLNLASSPAAAAAAKVCAGVRASPRHLLPRALDHQSRRVLSLSSSSSAGRAAGVRAMAAAEAGASTATQAKSSAGVKQALISLSDKTDLAYLGNGLQALGFSIISTGGTASSLEAAGVNVTKVEQITNFPEMLDGRVKTLHPSVHGGILARRDQEHHLKALNEHGIGTFDVVVVNLYPFYNKVTSGVISFEDGIENIDIGGPTMIRAAAKNHKDVLVMVDHEDYPALLEYLQGKQDDQQFRKMLAWKAFQHVASYDSAVSEWLWKQSNKGDVFPPNFTVPLSLKSTLRYGENPHQKAAFYGDKSLSVVNAGGIATAIQHHGKEMSYNNYLDADAAWNCVSEFESPTCVVVKHTNPCGVASRQDILEAYRLAVKGDPVSAFGGIVAFNTTIDEDLAKEIREFRSPTDGQTRMFYEIVVAPGYTEKGLEILKGKSKTLRILEAKRSGKGMLSLRQVSGGWLAQESDDLTPEDITFTTVSERAPQDSELSDAKFAWLCVKHVKSNAIVIAKNNCMLGMGSGQPNRLESLRIAFRKAGEEAKGAALASDAFFPFAWNDAVEEACQNGIGVIAEPSGSMRDGDAVDCCNKYGVSLLFTGVRHFRH

SEQ ID NO: 55653 - protein, 331 aa, Oryza sativa
MIRGLAAHDSGKHLVLRRRAAASQLTLYCTAIGGIGAALMAAFMYHMLRRTDQLTGLWVVSIFSGLIWFIGICHGLFTNRPSSSSPTTAFEPNFFTKLSYSMTLVRYPQAIGSLVAVFLSSFATMCIFTSGTLYAIGGVCIKPVLVLVLWILYFLFPLISLPLLHPIQIIIRADAVRMQLLGFIICLFVSGAGFYFKSHRWRAAHIIVIALVQSTANGVLYSFGRILLLDASPPGKEGAFAVWYAFVRCIGAMIGFAAASAGPGRAGGSFAAAFLGSFLGIIVLIFGNVSNIGALKAAGHLKGMEDEKRLGMEKGEGMSAVADSGEGRGRV

SEQ ID NO: 55654 - protein, 431 aa, Oryza sativa
METTAAATAAERRRPLFTTEELGGRAVYRVQAATVAAGILLVLYYRATRVPAAGEGRAAWLGMAAAELWFAVYWVIAQSVRWRPFRRRTFRDRLAERYEQNLPGVDIFVCTADPQSEPPSLVISTILSVMAYNYPSEKISVYLSDDGGSILTFYALWEASIFAKKWLPFCKRYNIEPRSPAAYFSESKVHHNLCIPKEWALIKDLYEEMRERIDTATMSGKIPEEMKLKHKGFDEWNSDFTLKNHQPIVQILIDGKNRNAIDDDRNVLPTMVYVAREKRPQYHHNFKAGALNALMRVSSVISDSPVILNVDCDMYSNNSDSIRDALCFFLDEEMGQKIGFVQYPQIFNNMTQNDIYGNSFNVSYHVEMCGLDSVGGCLYIGTGCFHRREILCGRIFSKDYKENWNRGIKERGKENINEIEEKATSLANLHL

SEQ ID NO: 55655 - protein, 1111 aa, Oryza sativa
MKNFFRKLHIGEGSGDGASSSPPPPPSSRKGSGGVGGNHHLHAEQRQPSASAVSSWLDSVPGRPQPPTPSTPSEAEGSPFSSSVGSGAEERRQSVAAERRRSQEEEWERRRSQEEEAVREMRRSQEEDEVEERVIRESSEAEERKRVREKEDDDLEEFQLQLVLEMSARDNPEEMEIEVAKQISLGFCPPQSSTAEALAARYWNFNALGYDDRISDGFYDLYVTGNGPASITMPSLKDLRAQSLSHRVNWEAVLVHRGEDPELMKLDQTALIMSLELRESKPSEFVGNDLVQKLAGLVARHMGGTFFDSEGMLVKYQKMMRYLRTSIGSVVVPLGQLKIGLARHRALLFKVLADNIGIPCRLLKGRQYTGSDDGALNIVKFDDGREFIVDLVADPGTLIPSDGAVLSTEFEESSFSNNHHFNKDNDIRQLGSSNSLSNSACSSFECELLDRRSTWINVGPSDSDGATTSQTSKNNQQNTLSDSFGILSVSTFTSENRPITNESRSTDDIAAAKNKERSSVTINSSSTSPSPSSPEVGSTPAVRRMKVKDISEYMINAAKENPQLAQKIHEVLLENGVVAPPDLFSEDSMEEPKDLIVYDTTLFQSKDEMKKRMNELGSREYADRGHGPLLPHHPGHELPSKVPHRAPLDSLKPVEGLGIDHPPDIQDNTSFISQYEPSAPPQEASSQLTKQLPVTAAAVATAAVVASSMVVAAAKSNNDVNFDVPVAAAATVTAAAVVATTAAVSKQYEHLEPGNQLHSLPSPSEGNESIEKSADEFWDKQNFEIDHGQDNTLDQEKDSAEVRQDAERTSDKSSGTESAKSEITLDDVAEFEIQWEEITIGERIGLGSFGEVYRGEWHGTEVAVKKFLQQDISSDALEEFRTEVRIIKRLRHPNVVLFMGAITRVPNLSIVTEFLPRGSLFRLIHRPNNQLDERKRLRMALDVARGMNYLHNCTPVIVHRDLKSPNLLVDKNWVVKVCDFGLSKMKNKTFLSSRSTAGTAEWMAPEVLRNEPSDEKCDVFSYGVILWELCTLLQPWGGMNAMQVVGAVGFQNRRLDIPDNTDPAIAEIIAKCWQTDPKLRPSFADIMASLKPLLKNMTAQAPRQRVQQTDE

SEQ ID NO: 55656 - protein, 123 aa, Oryza sativa
MARIPLLLALLLAVSAAAAAQVGGNRGHGPLVGGWSPITDVGDPHIQELGGWAVERHASLSSDGLRFRRVTSGEQQVVSGMNYRLVVSASDPAGATASYVAVVYEQSWTNTRQLTSFKPAAAH

SEQ ID NO: 55657 - protein, 281 aa, Oryza sativa
MDFAELEAVEGLRWPWHAWPPTASAAASLVVPTSVLCTPLHPAAPDLLPLLPYAPLRCGGGGGGGGCGAALNPFSRVHHATARWACPFCGASANPFPRLLAPDALPAELFPTHSSVEYALPPDAAEAGGGPGPPSVVFVVDAATSGPELAALKAEVLRVVQGLPEGVRVALVSFAASVWVHDLGFEGCTRVVVMNGERELESEKIQEFLGVRDARYNKLAMPRSTKVQRFLLPVSECEFNITSAIEDLRSMSACPRGHRPLRATGAAISTAVASSKRLLFT

SEQ ID NO: 55658 - protein, 74 aa, Oryza sativa; identical to SEQ ID NO: 48193

SEQ ID NO: 55659 - protein, 782 aa, Oryza sativa
MARRVPTRPRGGGGGGVPRSEGSIQGRGGRAGGSGAEDARHVFDELLRRGRGASIYGLNRALADVARHSPAAAVSRYNRMARAGAGKVTPTVHTYAILIGCCCRAGRLDLGFAALGNVVKKGFRVDAITFTPLLKGLCADKRTSDAMDIVLRRMTELGCIPDVFSYNNLLKGLCDENRSQEALELLHMMADDRGGGSPPDVVSYNTVLNGFFKEGDSDKAYSTYHEMLDRGILPDVVTYSSIIAALCKAQAMDKAMEVLNTMVKNGVMPDCMTYNSILHGYCSSGQPKEAIGTLKKMRSDGVEPNVVTYSSLMNYLCKNGRSTEARKIFDSMTKRGLEPDIATYRTLLQGYATKGALVEMHALLDLMVRNGIQPDHHVFNILICAYAKQEKVDQAMLVFSKMRQHGLNPNVVCYGTVIDVLCKSGSVDDAMLYFEQMIDGGLTPNIIVYTSLIHGLCTCDKWDKAEELILEMLDRGICLNTIFFNSIIDSHCKEGRVIESEKLFDLMVRIGVKPDIITYNTLIDGCCLAGKMDEATKLLASMVSVGVKPDIVTYGTLINGYCRVSRMDDALALFKEMVSSGVSPNIITYNIILQGLFHTRRTAAAKELYASITKSGTQLELSTYNIILHGLCKNNLTDEALRMFQNLCLTDLQLETRTFNIMIGALLKCGRMDEAKDLFAAHSANGLVPDVRTYSLMAENLIEQGSLEELDDLFLSMEENGCSADSRMLNSIVRKLLQRGDITRAGTYLFMIDEKHFSLEASTASFLLESSPIVWEQISRIS

SEQ ID NO: 55660 - protein, 359 aa, Oryza sativa; identical to SEQ ID NO: 29343

SEQ ID NO: 55661 - protein, 402 aa, Oryza sativa
MKLVKGSKVEVLQEAEVPLGSWRGAEIVLGNGQSFYVRYDPSPVDSCAAVERVQRRLIRPCPPRDDSVCWAVGDILEAFDSYSWKIAEMVRVLGKDFYLVRLLGSSLELRTHASELRLRKHWKDGKWTVLQKDSTKCFGGSFRGQPKSGNLGSNFGKQRQPYCAMDNNLLLKNQKALEGDKSRGMKRKSSAITHPTQCSEVTRGMERLQTPHRDGRHAALVAGVSPRLAEKVDAVDSPCLMLGEKYMHASLNKRKNGVHTTNLAGVNVDTENKFRPLTSAYPSDTESISSSVGSCSPSSSPCSSRHFYSAYQTGDICSRTDGAEAAVSERETSQHDKIIPKEDTHLLELHAYRATMLALYVCGSISWEQEALLTNLRLTLNISTDEHLAELRSMVSSAITSR

SEQ ID NO: 55662 - protein, 232 aa, Oryza sativa; identical to SEQ ID NO: 30620

SEQ ID NO: 55663 - protein, 111 aa, Oryza sativa; identical to SEQ ID NO: 29040

SEQ ID NO: 55664 - protein, 212 aa, Oryza sativa
MRTARTPASAARGGRALYELYRAASRAAAPAALLWRRLRGLEHPSRWPERLGRPSVARPRPGSPLVWFHAVSLGEGMAALPVVRHCARLHPGLPILLTTTTLSSFEVMKDLLPDGVIYQFAPLDCPDAIESFIGYWKPNLILLMESELWPNLILSAAEKGIAVVLLNARMSLKSFNGWSLPLGLQLVSLMLSKLSLVIPLVWSGGVLNLILM

SEQ ID NO: 55665 - protein, 302 aa, Oryza sativa
MPSIAGAGGGRLFSVNGAAAYWGSSRRRLLLLQRPLFSSLAGGGTGDDVTPHLPVVIVGAGPVGLVLSFLLTKFGIKCAVLEKNVEFTRHPRAHFINNRTMEIFRKLDGLAGDIERSQPPVDLWRKFVYCTSLSGSILGSVDHMKQEDFDKIISPISVAHFSQHKLVDLLLKKLDGIGFQTCLPGDIGSSTQDLVWENKIWWGHECSSVQLTDKGILIGASFNEAGRMQERKIHFGLLLGADGARSTVRELAGIHMKGQRDLQKLVSVHFRSKDLGKYLSRERPGMLFFIFNPGAIGVAGCT

SEQ ID NO: 55666 - protein, 244 aa, Oryza sativa
MDKKQTSLGTPVYRTNPFDSDSDSEVPSRPSRAQSVPVRRTDQSIQELEDYAVDKVEETSRKVNDCVRAAEAIREDATKTLVTLHRQGEQITRTHRVAADIEHDLSMSEKLLGSLGGLFSKTWKPKRNQQIKGPISQNNSFTSSANHMEQRQRLGISSTRQPSPNQVHRSPATAIEKVQVEIAKQDDALSDLSNMLGELKGMALDMGTEIERQNKSLDAFGDDVDELNFRVKGANQRGRRLLGK

SEQ ID NO: 55667 - protein, 595 aa, Oryza sativa
MRRATTAASSSTSDHAAPASKPRRKPGGWLRGIRHLAGSVAYGRSSTDERDKEKEKEKKEREARRLSSATDDSLDGNGSRNAGRVRVRQYGKACKELTGLFMTQELAAHSGSIWCINFSLDGRYLASAGEDRVIHVWEVSEGERKGELLGEGTVARENGGGCSPFLAAVGNGSPELATLSLSCADGGFVEKKRRPRMQSSRKSVGSDHLVVPECVFGFRDKPVCSLLGHAADVLDLSWSKSQYLLSSSMDKTVKLWDITTSTCLKTFSHTDYVTCIQFNPVDDNFFISGSLDEKVRIWNVHDRKIEDWNDLHEMVTAACYSPDGQVALVGSHKGSCHLFDTTEKKLQYKSQIELRIRKKKSGQKKITGFQFAPGSSSEVLITSADSRIRVVNGDELVHKFKGFRNTSSQISASVAPNGKYVVCASEDSHVYVWRHDNTSHPSRSRSAVDVTNSYEHFHCHDVTVAITWPGAESRGSFGSRSSRNSDSDDAVMNTGRDAPVENSEHDLNGTVNRCTKRPVCEGVASTSNPPADGVSTSWPDEKQSSAKSSPGHCSSDLCIGALDVQRRSAWGLVIVTAGRGGEIRVFQNFGFPVQV

SEQ ID NO: 55668 - protein, 194 aa, Oryza sativa
MGSRVLLLRRMEKGWRPMSRALYPSPGSTSVAPPHELRAPRRCSPSYTSHKVFHRDVGFFSGWQSYNLQIYCCIHTSRPVNSQNHTIAEPQQKQEDVALVDESGRPKAKRKKLKGRRAVTRFLKSLRWKKKREFQRMTAEEKILYKLKLARNKEERLVAALTKIEPDDPSEPTHDPEVLTPEEHFYFLKMGQKK

SEQ ID NO: 55669 - protein, 533 aa, Oryza sativa
MPFRPTLPRRCSHDPKLSSFLSALASLTASPSSSSSSPLPPAGSVPASPTPAAYNALMSAYSRAGRHGEVLRLFRSLPFAPTAPLFTTLISSLAASGRPLAARAAFASLLKSGVPPTASAFTALLRSSSDALDFVDSVFRAMEALGCSPDAAVYNWVISMLCDFQLVQEALGFLDHMLENGPRPTARSFTAILRAYCEQGRFFDAGRLVDTMIQNGCPPDVVSYTVLIEGLCRVGEFSTVEMILGESESQGWMPTAVTYNIYMSGLCRMGFLDEAFRQVDIMRGRGLSVTAETVHILFDCLCRNAMFSEAVCLLEHSEELGWDVDVFCYNTLMSRLCDVDDFARVLKLLVDLLKKGIGPDKFSFTIAIRSLCRAGKLRLAKCLIENKGIKYDVVAFNTLIHGFCIAGDLDRVQQTRTDMINRDVIPNNFTDAMLIDSLCKERKFGEAKRFVLDSLVNGLVPDHLIRLNNWLVKAKKMTLLLKLLYEIRCKGIVVDTSIISPLVRVFCWEGYCRRDNFYQISPILDIIVTYVEQ

SEQ ID NO: 55670 - protein, 509 aa, Oryza sativa
MAATPGSSRPANVAAAAATEARFHSHPPQQDRRSGWAGCLSGLSCFGSQKGGKRIVPAARVPDGNASTSRGNAHQSGANSNQSAALNLSLLAPPSSPVSFSNSAIPSTAQSPNCFLSISANSPGGPTSNMFAVGPYANEPQLVSPPVFSTYTTEPSTAPLTPPPELAHATTPSSPDVPYARFLLSSMDLKTAGKDHNMPYLSTAYSGGSGLQASYPLYPESPSSSLISPASATPRTGLSSPIPEQEVPTAHWKTSRSACDTPYSRASPIPEQEVCTAHWKTSRSACDTPYSRNSPSNIFGLDSAASRNYMLDNNFFRPAASAQFYLDQAQQSFPYNNGGRISVSKDKQDVEEVEAYRASFGFSADEIVTTQTYVEIPDALDEGFSISPFGNNAPATEVDKSLFNVKVITGPKKSTEQKLSNGSPQNVVHLDIFKGTKGGDVCEDEGMVKDCHPFRKGRDEISLKPIEVRKKVGGGQSCSDAEIEYRRARSLREANGVVSWRSTLARQLQ

SEQ ID NO: 55671 - protein, 119 aa, Oryza sativa
MILRWLDRMKPSAQIRPHPPGPPNGSSEQFRHLSSTSKSTGAQKPTSKTLPCDGGKVLFSPLNIRPKSFPVLPTMMQPTRISASSQCRRISYSSFPSATAKRNDFMQGVFRKDIAQLMV

SEQ ID NO: 55672 - protein, 649 aa, Oryza sativa
MAPTKGEGPAIGIDLGTTYSCVGVWQHDRVEIIANDQGNRTAPSYVGFTDTERLIGDAAKNQVAMNPINTVFDAKRLIGRRFSDASVQSDIKMWPYKVIPGPGDKPMIVVQYKGEEKQFSAEEISSMVLIKMREIAEAYLGSTVKNAVVTVPAYFNDSQRQATKDAGVIAGLNVMRIINEPTAAAIAYGLDKKATSVGEKNVLIFDLGGGTFDVSLLTIEEGIFEVKATAGDTHLGGEDFDNRLVNHFVQEFKRKHKKDISGNPRALRRLRTSCERAKRTLSSTAQTTIEIDSLFEGVDFYSTITRARFEELNMDLFRKCMEPVEKCLRDAKMDKSTVHDVVLVGGSTRIPRVQQLLQDFFNGKELCKSINPDEAVAYGAAVQAAILSGEGNEKVQDLLLLDVTPLSLGLETAGGVMTVLIPRNTTIPTKKEQVFSTYSDNQPGVLIQVYEGERTRTRDNNLLGKFELSGIPPAPRGVPQITVCFDIDANGILNVSAEDKTTGQKNKITITNDKGRLSKEEIERMVQDAEKYKSEDEEHKKKVDAKNSLENYAYNMRNTIQDEKIASKLPADDKKKIEDAVEQAIQWLDNNQLAEVEEFEDKMKELEGLCNPIIAKMYQGAGADMGGGMDDDAPAAGGSGAGPKIEEVD

SEQ ID NO: 55673 - protein, 395 aa, Oryza sativa
MAPPPASSLPTAVLAWGSGEDGQLGMGGYEEEDWARGVAALDALAVSAVVAGSRNSLAICADGRLFTWGWNQRGTLGHPPETKTESSPAPVDALAGVSIVQAAIGGWHCLAVDDKGRAYAWGGNEYGQCGEEAERKEDGTRALRRDIPIPQGCAPKLKVRQVAAGGTHSVVLTQDGHVWTWGQPWPPGDIKQISTPVRVQGLENVKVIAVGAFHNLALTEDGILWAWGNNEYGQLGTGDTQPRSQPIRVEGLSDLSLVDIAAGGWHSTALTKEGEVYAWGRGEHGRLGFGDDKSSHMVPQKVELLAGEDIIQVSCGGTHSVALTRDGRMFSYGRGDHGRLGYGRKVTTGHPMEVPIDLPPPGTSGGDSGGQWQARYVACGGRHTLAIATWTEADE

SEQ ID NO: 55674 - protein, 392 aa, Oryza sativa; identical to SEQ ID NO: 51317

SEQ ID NO: 55675 - protein, 602 aa, Oryza sativa; identical to SEQ ID NO: 36761

SEQ ID NO: 55676 - protein, 267 aa, Oryza sativa
MEWDKAKASSGEAVDDRGRGEGGLGYVKVMTDEQMEVLRKQISIYATICEQLVEMHRALTAQQDSIAGMRLGNLYCDPLMVPGGHKITARQRWTPTPMQLQILENIFDQGNGTPSKQKIKDITAELSQHGQISETNVYNWFQNRRARSKRKQAALPNNNAESEAEADEESPTDKKPKSDRPLHQNIAMRDHNSERISEMHHFDTEHEQIRRMMYASNDSSSRSSGSLGQMSFYDNVMSNPRIDHFLGKVESPGSFPHMRSGESFDMY

SEQ ID NO: 55677 - protein, 531 aa, Oryza sativa
MPAVEGMRDVVATVSGYHGDERHRLVRLIAETGASYVGAMSRSITHLVCWRLEGKKYDIARRLRTRVVSHRWFEDCLKEGRRLPEKPYMLESGEEAGPVPELPTFPRSRSKRNASMEDRCLKELPDDFCNTSYATDVLVVADSGSDCNHQRWSDSSLLKENFVGDRDNSKIGATHVKERRKRLKHAQNSTNEDALDAEDNISRLMARQGRYESSYTSSRSASNQKGDLLKLLHNDDASMMRKRNSLMKKETRTKLAGYLIESCENGSLTDSFDEPQMSDTPPTEDRRKIRKTRLRQSTLDSIYDYGEASEHDPEKSEDQENFELGESSRSFQSSDSSRQEPAFCTEKTNQGSIDIAADDDKGDDEKATLEEPTSCQGQAELSCVICWTDFSSTRGILPCGHRFCYSCIQEWADSLSSRGKVSTCPLCKTSFAWISKIDEAGTSDQEIYSQTIPCSTSTDTFIFDDRVYGLPESPSGQGACYQCHCREPEELLLSCHVCRSQWVHSYCLDPPLTPWTCIHCRDLRMLYQRYR

SEQ ID NO: 55678 - protein, 606 aa, Oryza sativa
MLRSGAVRPDAVTCTVALSLAAGRGEGFLVRQLHALAWRSGLAADVFVGNALVTAYSRGGSLGEARSVFDDMPARDLVSWNALICGLAQDGDCPAEVIGVFLRMLRDGDVQPDRISVCSVIPACGGEGKLELGRQVHGFAVKLGVEGYVSIGNVLVAMYYKCGAPGSARRLFDAMSERDVVSWTTAISMDGEDALTLFNGMRRDGVPPNEVTFVALMSALPADCPARGAQMVHAACLKAAVSGEAAASNSLITMYAKARRMDDARMVFDLMPRREIIAWNAVISGYAQNGRCNDALELFSSMARCLTPNETTFASVLSAVTAVETVSMAYGQMYHSRALSMGFGDSEYVAGALIDMYAKRGNLEESRKAFHETEQRSLIAWTAIISANARHGSYGAVMSLFGDMARSGVAPDGVVLLAVLTACRYGGMVDAGRDIFDSMAADRGVELWPEHYSCVVDMLGRAGRLAEAEELMMRMPAGPSVSALQSLLGACRIHGDAEIGERVARILTEKEPTESGAYVLLSNIYADVGDWDGVAKVRRKMRDRGVKKEIGFSWVDAGAGEALHLHKFSSDDTTHPRTEEIYAVADVLGWEMKFLKNCSQMEMILI

SEQ ID NO: 55679 - protein, 502 aa, Oryza sativa
MSPPGRKAPAGAGGIRRWLSTVVVSVVALVLTLVVISLSVGSSLTGASLHEYLFVRPSDSSKLTDGNMNGTAVGVPLQEEVLQGGKEVPVEHGVQSGGVNSSETGEIDTKVQDPVVTDDTASVPDERNLPVSSDSSDNLQKTNEGSCDLYHGHWVFDSSGPLYTNNSCPIITQMQNCQGNGRPDKDYENYRWKPEQCILPRFDGPKFLELMRGKTIAFVGDSVARNQMESLLCILWQVEAPVNRGSRRMSKWIFRSTSTIIVRIWSSWLVHRSTEAVGFAPKGIDKVFLDIPDETFMEFIPRFDVLVLSSGHWFAKRSAYILNGNVVGGQLWWPRKAGNMQINNVDAFGTSVETCLTALATNPNFTGIAIVRTYSPDHYEGGAWNTGGSCTGKTKPLDVVVRNGFTDTMYGKQVSGFTKAVQNSGKHGSRLKLMDITEPFALRPDGHPGPYRSTDPNKKTQRGPDGRPPPQDCLHWCMPGPVDTWNEMLLETIRREFEGVRS

SEQ ID NO: 55680 - protein, 320 aa, Oryza sativa
MPEQDSNDVCGVMLEDGSSCLDHPVQGRKRCELHKGRRLGRITVNPKGSSCSYSCQVEIPVVESISPLTENESESDQAQQTSELLSKFLPATVKKSSRPWYSFEAKEIKTGEAPIEDGKQETSEVIDICEAKKSDNSACTNKVISGSKKCQLHNGCKAEEFVSSRVIDLLQNEEKVKSMTVDKLSGEEISHGKYQSQENQPSGRMWFELIKLQNPTSTLSSKGQGRQKRVTGNVAAICEALTDNRCRETIPMAGRERCDAHEGIKVTDASSVPFSGSSGWPSICGARASDCSPCKNQPIAGRKRCAMHKGQRACRTPSID

SEQ ID NO: 55681 - protein, 82 aa, Oryza sativa
MALLTKPRISRMMFSCALFSCIGDFSVAAAIDTLRRKVRNSKHRLLLLAGARCRLITSMATSQFSLHSPRQLCRFKISTGYI

SEQ ID NO: 55682 - protein, 252 aa, Oryza sativa
MTWCNSFNDVRAVENNLATAAAVAAAKKQQQQQQVSQHVNLIKTCPSCGHRAQYEQAAAAATIQDLPGLPAGVKFDPTDQELLEHLEGKARPDARKLHPLIDEFIPTIEGENGICYTHPERLPGVGKDGLIRHFFHRPSKAYTTGTRKRRKVHTDEQGGETRWHKTGKTRPVFTGGKLKGYKKILVLYTNYGKQRKPEKTNWVMHQYHLGSDEEEKDGELARVQGVLPDAAEAVRRRLGSDGQGPLRRPRRR

SEQ ID NO: 55683 - protein, 178 aa, Oryza sativa
MRYIAELERKVQTLQTEATTLSAQLALLQRDTSGLTTENSELKLRLQTMEQQVHLQDALNDTLKSEVQRLKVATGQMANGGGMMMNFGGMPHQFGGNQQMFQNNQAMQSMLAAHQLQQLQLHPQAQQQQVLHPQHQQQQPLHPLQAQQLQQAARDLKMKSPMGGQSQWGDGKSGSSGN

SEQ ID NO: 55684 - protein, 194 aa, Oryza sativa
MASELNLEMRTDGYVRVRDLLKLNLQTFAKIPLKSHTVDEIKEAVRRDNKQRFGLLEEDGELLIRANQGHTVTTVTSESLLKPILSADEVSVCVHGTYRKNLDSILHQGLKRMARLHVHFSSGLPTDGGVISGMRQSVNILIYLDVSMALQDGMKLYISDNKVILTEGFDGVVPVKYFEKIETWPGRAPIPFEK

SEQ ID NO: 55685 - protein, 736 aa, Oryza sativa
MASYGVDTRPAAAAAGGGGAGAGAAGEGALSFLSRGLREDLRLIRARAGELETFLTAPVPEPELLARLRRAYSSSAGTTRLDLSAIGKAFGTGVVGRGSRGARWGWEEVQEAEEWEPIRMVKARLREMERRRQWQATDMLHKVKLSLKSMSFVPEASEEVPPLDLGELLAYFLKQSGPLFDQLGIKRDVCDKLVESLCSKRKDHLAYNSFPASEPSAFSNDNAGDELDLRIASVVQSTGHNYEGGFWNDGHKYETADKRHVAIVTTASLPWMTGTAVNPLFRAAYLAKSSKQDVTLVVPWLCKSDQELVYPNSMTFSSPQEQEAYMRSWLEERVGFKTDFKISFYPGKFQKERRSIIPAGDTSQFIPSKEADIAILEEPEHLNWYHHGKRWTDKFNHVVGVVHTNYLEYIKREKNGVIQAFFVKHINNLVTRAYCHKVLRLSGATQDLPKSMICNVHGVNPKFLEVGERIAAERESGQHSFSKGAYFLGKMVWAKGYRELIDLYAKHKSDLEGIKLDIYGNGEDSHEVQSAAMKLNLNLNFHKGRDHADDSLHGYKVFINPSISDVLCTATAEALAMGKFVVCADHPSNDFFRSFPNCLTYKTSEDFVAKVKEAMARDPQPLTPEQRYNLSWEAATQRFMEHSELDKVLSSSNRDCTTSTSGCGKSGDNKMEKSASLPNMSDMVDGGLAFAHYCFTGNELLRLSTGAIPGTLNYNKQHSLDLHLLPPQVQNPVYGW

SEQ ID NO: 55686 - protein, 220 aa, Oryza sativa
MASLANSSVHLLLLVVVLAAAADAVTFTIVNKCGYTVWPAALPSGDGNQLDPGQSWAVYVPAGTKGARVWGRTGCGFISGGSLGQCQTGDCGGTLRCAAVGAPPVTVAEFSLGQASKDDYFDISLVDGFNAPMAIVPAAAGGRRCPRGGPRCAAEITLQCPGELRAKAGCSNPCRGNSTCGPTKDTEFFKKLCPETVTYARDGQGTTFTCPAGTDYQIVF

SEQ ID NO: 55687 - protein, 378 aa, Oryza sativa
MATAGKVIKCKAAVAWEAGKPLSIEEVEVAPPQAMEVRVKIIYTALCHTDVYFWEAKGQTPVFPRILGHEAGGIVESVGEGVTELAPGDHVLPVFTGECKECDHCKSEESNMCDLLRINVDRGVMIGDGKSRFTIKGKPIFHFVGTSTFSEYTVIHVGCLAKINPEAPLDKVCILSCGFSTGFGATVNVAKPKKGQTVAIFGLGAVGLAAMEGARLSGASRIIGVDLNPAKFEQAKKFGCTDFVNPKDHSKPVHEVLIEMTNGGLDRAVECTGNINAMISCFECVHDGWGVAVLVGVPTKDDVFKTHPMNFLNEKTLKGTFFGNYKPRTDLPNVVELYMKKELELEKFITHSVPFSEINTAFDLMLKGGESPLRHEDG

SEQ ID NO: 55688 - protein, 450 aa, Oryza sativa
MGHGVSCARTGDEHDFFRAAQLGDLDALAALLAADPSLARRATLYDRLSVLHIAAANGRIEVLSMFLDRGAPPDAVNRHKQTPLMLAAMHGKIDCVLKLLQADANILMFDSVHARTCLHHAAYYGHVDCLQAILAAAQTTPVADSWGFARFVNVRDDHGATPLHLAARQGRPGCVQVLLENGAIVSALTGSYGFPGSTSLHLAARSGNLDCIRKLLAWGADRLQRDSAGRIPYSVALKRNHGACAALLNPTSAEPMVWPSPLKFISELEPEAKALLEAALMEANREREKKILNGTKYSLPSPSPGDDSADDDACSEVSDTELCCICFDQACTIEVQDCGHQMCAPCTLALCCHNKPNPTTLTPPSPACPFCRGSISRLVVAQTRSACDPDKQSSLQLTRKRSRRSHNLSEGSSSFKGLPSAMGSFSKLGRGSSRMADSDSSNLDKPEHDL

SEQ ID NO: 55689 - protein, 931 aa, Oryza sativa
MEVNPSATAHSGNSVTSSGRRARGPTRMPSGMYTITAVDEDGNPTSPKSALTPYSNAIGVIARDDIPIKYRHWKKADVDELEWTVPNRYKDLAWERLKRTFQFPEGSEQRAKDRALQRMSVSFKKWKSDLASKFIRKGLTPNFEDNNYRRIRLFWDDFVAYRASEEAKEISERNQANSAKNLYPHRLGPSGYAKNVDKWREREDELLEKGIEIETKDWSQRAKNYQYARGATLSGIGELVHKGPREQEVTQRLHDAHQKSSEGSFVPNREKDELTLALQNDEHPGRTRGVGLVPWREGFTEDGHRYRSRRYKNSGDQSEEIRQLKDQMALIMARLDSQDRGDAGRVISPGGRKSSCASTKVPQEPDMARYPVDDITVRTACRLHVPLQNITQEVARGMAHPVMEGGKIHSNLIPSGYSRVEVGDVPSRYRAVQLDFAPEKGINTLGEAVHNIILWRKRFIVFPSGDSDDEPSDDGSSSEGLSVSPRRMPTPPPLPRKSQSPPPAQRKSPSPPPAEHHRLASSDPPKKRGRLCKTSQMFEPPSLKKTKKAPLPNMSEPTLKEKKKEAANVKVPVAIQDHFIRMARPPAPLVPISNFRRTIRKKKLQEFSKEEFETSKTMQDFLEGARLNSLFDVRNIANAPLAAQYKLGHSLTTDEYRNIVGNCTQMRRVEEWYLQMAKEGKEMFPVFYRDEDFHHCDGIFWVPFKELFQLYNLMELDLSLIQLWTLMAALECRTTHGKLGFLDPQIINSRNIDQLGDKSEQAVVDYVPHWILLVIHLNDSKIVVFDGLRTPQAKFQSVIDTLNKALVRYKKKCIRHAPRANTFRVWAHPYCLRQDPGTSTCGFYLMRFMSIFMEDNNWNIMDAKKLKLPTSKLLPHACFGLAEQLCGFIFNHIISSDGAYNISKAPTGLVGFIEAGCPSDTLDSRSTTKEM

SEQ ID NO: 55690 - protein, 620 aa, Oryza sativa
MAAEAPPSSSTSSSAGPPAAAGSSGGGAAASPDSYIGSLISLTSKSEIRYEGILYNINTEESSIGLRNVRSFGTEGRKKDGVQIPASTKVYEYILFRGSDIKDLQVKSSPPPPPPPQPAAPHNDPAIIQSHYSQPASASSSLPSAGSAVLPDLSSQAAQYGLQRPSVQSNIPLYQPGSVPWGSSAPPSAGNASGLSVPPMYWQGYYPPGGLPPHLQQPPLLQPGLSVPQGLQYAGLNPTLSSGPQKLSELQPPLLQPPGTTQGPSSGILPTTTAPSSANLLSPETSKPLLPNMGPLFTPPVPSVGATLPLASLPTSIAESSAMAPHNFSSLVSNKTADIPGSTLAYQSVSQAVSSTVASSSSAHMDMPVPLLASSGQLLQNAPSMLSSSQSMQTPLQMSSKDFKAVESKTRVVEPLLPDPPSRALPENNEPILPLPKQTPQKYNGAGSHSNHHYRGRGRGRGSAFSQSVTNFTEEFDFMAMNEKFNKDEVWGHLGKKSHSRDKDGELGDDVFDEDLEDEETENPELAAKPVYVKDDFFDSLTSGTFGRGGQNGRSRFSEQRKLDTETFGDFPRHRQPYRGGGRGYRGGGRARGSYYGGRGYGSMGARGGQGNSYPHRGSY

SEQ ID NO: 55691 - protein, 555 aa, Oryza sativa
MEVEVEVEMSPAAAKAAVFSPYSSPSTALLLQRRVVSWAKETGSPATVSVHVGDRSFNLHKDPLVSRCGYLRQAILRCGDGDGEVVELPASFPGGSEAFEVIGLYCYGDAVALDPFNVAAVRCAAEFLDVSGLGARCDLYINQVVLQSWDDALIVLQRCQPLLPVAEELLVVSRCVESLAFMACMEILDPDGDEQRRERDQPGLLAAAAARGLAGRRWDAELVKELAARDLWIKDLVALPFEFFRRIVLALRRQGMKEKYVSPVVLFYANKWVLSKKTHKFMASTDTGDGETDANRRATAILQGVIDLLPLESSAATGGAIPVSFYFALLARSITLELSDESQTRLRELVASNLQFARVDDLPLPEPEQDAGGQSIAGSPEVRAMESIVASHVSMQRRGAEAVAELWDRYIAQIVGDPKLRPDRLAELIGVVPAGDRKSHDHLYEAIDTYIVEHPGLSGDEKASLCGHLECRKLSHEACIQAVQNDRMPLRLIVQALFVQQLHTHRAFTECSDSFRCMHSGELLVPVSGGQAASAGVLQQLHWLHAVGIAAAVRE

SEQ ID NO: 55692 - protein, 128 aa, Oryza sativa
MITSACCFKPLFFCNRQPVILFSPMIPLKLSLSGKQFQHFADNDPNKKLKFLLIFMKLPCTSLLCITITSDCCFKSLLLQATCDFVQSYDSSDVKSQWHEIRLRFADNDPSKDIPSHLHLRRRINMDT

SEQ ID NO: 55693 - protein, 305 aa, Oryza sativa
MDSSAASAAAAAAAPVVLVTNDDGIDAPGLRFLVGQLVAARRYRVLVCAPDTDRSGVSHSITWRPALRCKRVDIDGATAFAASGTPADCASLGISGKLFDGLVPDLVVSGINVGNNCRCHVIYSGTVGGAREAFLYGIPSLAMSYDWVASQSSVNDLKVAAEVVMPLINNVMAEIKNGTYPQGSFLNIDIPTDAAHHKGYKITKQGRYMARIGWEQTVYKKPAVESYQTANMDVDSEKDSEVDTSSENDLLFKRVLVRRSYDEEEGDDIDHKCLVDGYITVTPLGALSRAEADVIPYYKACLSRL

SEQ ID NO: 55694 - protein, 874 aa, Oryza sativa
MTPRTAAALSGLLRGKNAVNLAPGQVPKLLATRASPARVEDGVCLRDPPGARYPLDEIPRRDAAVGANRVLFDYARRGMVLEVLDQFSVACRGGVLVDSATLSCVLKACRSVPDRVLGEQLHCLCVKCGHDRGEVSAGTSLVDMYMKCGSVCEGIEVFEGMPKKNVVTWTSLLTGCAHAQMHSEVMALFFRMRAEGIWPNPFTFASVLSAVASQGALDLGQRVHAQSVKFGCRSSVFVCNSLMNMYAKCGLVEDAKSVFNWMETRDMVSWNTLMAGLQLNECELEALQLFHESRATMGKMTQSTYATVIKLCANLKQLALARQLHSCVLKHGFHLTGNVMTALADAYSKCGELADALNIFSMTTGSRNVVSWTAIISGCIQNGDIPLAVVLFSRMREDRVMPNEFTYSAMLKASLSILPPQIHAQVIKTNYQHIPFVGTALLASYSKFGSTEDALSIFKMIEQKDVVAWSAMLSCHAQAGDCEGATYLFNKMAIQGIKPNEFTISSVIDACACPSAGVDQGRQFHAISIKYRYHDAICVSSALVSMYSRKGNIDSAQIVFERQTDRDLVSWNSMISGYAQHGYSMKAIETFRQMEASGIQMDGVTFLAVIMGCTHNGLVVEGQQYFDSMVRDHKINPTMEHYACMVDLYSRAGKLDETMSLIRDMPFPAGAMVWRTLLGACRVHQNFELWKFSADKLLSLEPHDSSTYVLLSNIYAAAGKWKERDEVRKLMDYRKVKKEAGCSWIQIKNKVHSFIAFDKSHPMSDQIYKKLKVIITRLKQDGYSPNTSFVLHDIAEDQKEAMLVAHSERLALAFGLIATPPGTPLQIVQNLRVCGDCHMVMKMVSMIEDREIIMRDCSRFHHFNGGACSCGDFW

SEQ ID NO: 55695 - protein, 220 aa, Oryza sativa
MQICRSLVRHLKSRANEDGMFYWDVQIDRGGRMTNFFWRDGRSRIDFDCFGDVVVFDATYRLNKHNLICAPFVGVNHHWQNTMYGCALLADESMSSFVWLFKSFLEAMGNRHPRSIFTNQDQVMSKAIEEVFPNTCHRISRWHIQKNAASRLGTLNGSQAFNKLFTKCMQGCDSEAEFEETWAWMLREFKLEDNQWLKKLYKLKQKWCGALNQHTFDGWG

SEQ ID NO: 55696 - protein, 489 aa, Oryza sativa
MESLRDMVLPPGFGFHPKDTELISHYLKKKIHGQKIEYEIIPEVDIYKHEPWDLPAKCDVPTQDNKWHFFAARDRKYPNGSRSNRATVAGYWKSTGKDRAIKMGKQTIGTKKTLVFHEGRPPTGRRTEWIMHEYYIDERECQACPDMKDAYVLCRITKRNDWIPGNGNELDNSDPHPEPYDAPPSVISTEQLNPAAEPVVGVEAAPVTVAEPDGVTTSAITANIPSPSDDINLDDWLNELFDPFFDPEQSLASADLSPDEQNVESSNVGALAPKVEQDYSSPNENVVDDTEYLLPEDVYNILHPGTDDFNMLQNPLDQYPIQYATDVWSGIQKEELWSPQANAEPSQSNEAADNGIIRRYRSMKTPETSVPQFKGKTQAKMRVGINKMATSSSESINQTIKFENSGRLVEHQKNQAHDVASTKRSDAGKPSTELSSNRGFLRGIRNAFAGCSDARWNMILVAGFAIGVAVVALHIGQRLGLSQRDQQHT

SEQ ID NO: 55697 - protein, 623 aa, Oryza sativa
MAPAAVAAAEAGSKAAAVAGKAVAACERDAEKLEFIEEMTRGFDAVQERVLAAILARNNGAEYLRRHGMEGRTDREAFKARVPVVTYEDLRPEIERIANGDRSNIISSHPITEFLTSSGTSAGERKLMPTIEDELDRRQMLYSLLMPVMNLYVPGLDKGKGLYFLFIKSETKTPGGLPARPVLTSYYKSDHFKHRPFDPYNVYTSPTAAILCTDAFQSMYAQMLCGLVARAEVLRVGAVFASGLLRAIRFLQLHWRELAHDIRTGTLSAKVTEPSIRDAVAEVLAAPDAELAAFVEAECGKDKWEGIITRMWPNTKYLDVIVTGAMAQYIPTLKFYSGGLPMACTMYASSECYFGLNLRPMCDPSEVSYTIMPNMGYFELMPHDPDAPPLPRDAPPPRLVDLADAEVGREYELVITTYAGLCLPRGRHPAGDRVPQRGAAVPVRPPQERAPQHRLRQDGRGGAAGRGGARVRAAVPLRRQHRGVHEPGGRDHHPGALRGVLGADGAGGRRVAAAGGGGGPRRVRTVLPRDGGGAQRRVQAGTQRRGHRAARDPGGARRHVRGGDGLRHLPRRLHQPVQGAALRLLRPHHRAAQLARHLQALQPGLPQIQPAQEVITHYTTRSS

SEQ ID NO: 55698 - protein, 188 aa, Oryza sativa
MGIDLVAGGRNKKTKRTAPRSDDVYLKLLVKLYRFLVRRTKSNFNAVILKRLFMSKTNRPPLSLRRLAKFMEGKEENNIAVIVGTVTDDKRIQEIPKMKVTALRFTETARARIVNAGGECLTFDQLALSAPLGENTVLLGGPKNAREAVRHFGKAPGVPHSHTKPYVRSKGRKFEKARGRRNSRGFKV

SEQ ID NO: 55699 - protein, 245 aa, Oryza sativa; identical to SEQ ID NO: 46209

SEQ ID NO: 55700 - protein, 262 aa, Oryza sativa
MSAAPPPPPPESPVAAAAGGGDKVLAAAQHIVKSLATSKNAADDMIRILSGFDNRLSQITSDLFPSPDLAADSDERGNPLWGQISAAAFDAAEQLIQVWDGTPEALVFEATEDEVAEYLSAVDVAIEHLARGSGGGAGGAGSSSSSTAGRAGVAVQLAMARLEEELRHLMVRHAVPLDPTGLFFSLRRLSLGSMDDLDTSSEFDAATPQSIDVAPETARGGPLVNPFEEQVFDPVRPEAVDDLRAIADRMGRAGYSRELADA

SEQ ID NO: 55701 - protein, 721 aa, Oryza sativa
MSGPVVPLAWTAQGPCEPSPGSGPLPVSAAASDPPAPSSSVPAGGREPSASGLPPAVTPQLGDHDQGGLPNCVPKVGMTFNSENEAYDFYNSYARNVGFSIRKNHANTRADGSLCSKYFLCSNEGQPVASTTQPGWKKRSSTRSDCKARLQFYISREGIWTVQKVELDHKHYLVSPDKSHMLRSQRRLTPSYQQIVNEMRQEGITAADMQRVFRQWSRGAENVHLLKKDTQRKYLQPSYAQKLLEYLKNKQTENPSFFYAVQLNDDGRIANFFWTDCQAIVDYACFGDVVSFDTTFETNKFEMPFAPFVGTNHHKQPILFGASLIYDESSESFNWLFQTFLTAMSGKQPATIFTDPSAEIIKSVRLVFPNSSHRLCLRHICHNAVKHLNHVICNHPEFLSDFKRRIYEERSVTFFDLKWKELVNAYNLDGNDWMNNLYAMREKWAAVYSRDSFYADMMTIQNAEGTSDALKNFRRKLCLPEFLEEYEKCITSFRQNELEADYNSRQTSPVPYVPDLPMLKTAAESYTRNLYSHFEEEFKKLFTLSCSLLSQDRTISTYKLTPLNSEEEAYVVFNSEDTTVSCSCRMYECTGMLCKHALRVLNYSNIFTFPSHYVYKRWTKYAKAGLFGCRNNSQSGNGSSMLRCARISQKMHSVALRYSMSEKALQFLESGVDKLTCEVENLLSHINLNGNGNDTGQSSGFCNGAMAESLGHSESMYSEGA

SEQ ID NO: 55702 - protein, 316 aa, Oryza sativa; identical to SEQ ID NO: 30651

SEQ ID NO: 55703 - protein, 272 aa, Oryza sativa
MLRVAGRRLTTALAWRPAAAAGARGPLAGGSLPGDDEFSREPQRPRFAVDSPFFAASRGFSSETLVPRNQDVSLTELPATVSAVKNPSAKIVYDEYNHERYQPGDPSKRAFAYFVLSGGRFIYASLLRLLVLKFVLSMSASKDVLALASLEVDLSSIEPGTTVTVKWRGKPVFIRRRTEEDINLANSVDIGSLRDPQQDAERVKNPEWLVVIGVCTHLGCIPLPNAGDFGGWFCPCHGSHYDISGRIRKGPAPYNLEVPTYSFLEENKLLIG

SEQ ID NO: 55704 - protein, 851 aa, Oryza sativa
MSGGGGGGGGGGGGGRGAAAGPVPGSARKLVQGLKEIVNRPDAEIYAALRDCGMDPDEAVSRLLSQDTFQEVKSKRDKKKEVNKEALEPKSRGAVNSNSRATRAGADRSGRSSSVQSGSSGADNMSSRSSILGPGVLATNSTQKQTVPSSTVNKDVLHDGSFGAMQPSSGFQNSWCGVPGQMSMADIVKMGRPQVRSSSKPVASTDNAYSGQTSSFSSVVNQNPNKSASTAPPTTFEQRFPVLQDPIPQVKNSSHASADNHETQESDWFQQDGTLPGSQLTVPETSRDISLPVASLESSTLVADDANSYNNSHVGESSSAIPSDRHLEIIDGNNHFNNGLLHNSSAYQSRGNHYDDNDDDDDEAEVSNVDVESASANIQHLSLQTEDLVASKSTEDNPAVIIPDHLQLANADCGHLSFGSFGSGAFSGLLPSKVHKNGVEEVPVPDESPSVDQEDVRNQDNNVALNSSTNGDVEARIGTSMENTDEPSVSQPDILTQGAVDVSSLQYNLPSVSDHVYSNTTQPSTMESSQGDIQVQHLPQFSSLLQANTLHNNLLGSNLPNLRDFDFSPLLSTQLVTKYNPPVPTTSLPAISMQETLKPGGFSNAQPTQNLPSASIPSGPPLPQQLSVHPYPQPTLPLGPFSNLVGYPYLPQNYYLPSAAFQQSFSSNGPFHQSAATTGVPGVSMKYSMPQYKGSLPATSQPQPSSVVSGFGGFGSSNNIPGNFGLNQNVPSAPTTMGFEEALSTQFKDNSQYIALQQNDNSAMWLHGAAGSRAVSAVPPGNFYGFQGQNQPGGFRQGQQPSQYGGLGYPSFYQSQAGLPQEHPQNLTEGTLNSSQTTPSQPSHQIWQHIY

SEQ ID NO: 55705 - protein, 701 aa, Oryza sativa
MAGNGPINKEDPLNWGAAAAEMAGSHLDEVKRMVAQFREPLVKIQGATLRVGQVAAVAQAKDAAGVAVELDEEARPRVKASSEWILNCIAHGGDIYGVTTGFGGTSHRRTKDGPALQVELLRHLNAGIFGTGSDGHTLPSETVRAAMLVRINTLLQGYSGIRFEILEAITKLLNTGVTPCLPLRGTITASGDLVPLSYIAGLITGRPNAQAISPDGRKVDAAEAFKLAGIEGGFFTLNPKEGLAIVNGTSVGSALAATVMFDANILAVLSEVLSAVFCEVMNGKPEYTDHLTHKLKHHPGSIEAAAIMEHILAGSSFMSHAKKVNEMDPLLKPKQDRYALRTSPQWLGPQIEVIRAATKSIEREVNSVNDNPVIDVHRGKALHGGNFQGTPIGVSMDNARLAIANIGKLMFAQFSELVNEFYNNGLTSNLAGSRNPSLDYGFKGTEIAMASYCSELQYLANPITNHVQSAEQHNQDVNSLGLVSARKTLEAVDILKLMTSTYIVALCQAVDLRHLEENIKSSVKNCVTQVAKKVLTMNPTGDLSSARFSEKNLLTAIDREAVFSYADDPCSANYPLMQKLRAVLVEHALTSGDAEPEASVFSKITKFEEELRSALPREIEAARVAVANGTAPVANRIVESRSFPLYRFVREELGCVFLTGEKLKSPGEECNKVFLGISQGKLIDPMLDCLKEWNGEPLPIN

SEQ ID NO: 55706 - protein, 203 aa, Oryza sativa; identical to SEQ ID NO: 31377

SEQ ID NO: 55707 - protein, 331 aa, Oryza sativa
MATSPESLCCFCPQPFREFVEYVVNLKFDEEPNYAKCISLFDTVVGPNPDIRPINTDGAQKLIHLVGQKRGRLLMEETDEQPKKKIRMGMPATQWISVYNARRPMKQRYHYNVADSRLVQHIDKGNEDGLFISCITSCSNLWALIMDAGTGFTSQVYELSPHFLHKEWIMDQWERNYYITALAGANNGSSLVVMSKGTMYTQQSYKVSDTFPFKWINKEWRDGFYVTSMATAGSRWAVVMSRNAGFSDQVVELDFLYPSEGIHQRWDNGYRITATAATWDQAAFVLSVPRRKPTDETQETLRTSAFPSQHVKEKWSKNLYLASVCYGRTVS

SEQ ID NO: 55708 - protein, 320 aa, Oryza sativa
MASEKNLRRAFINSSIELARANGFDGLDLAWRFPATQLDMENLGDLLAEWRAEIMEDSTTRSTEPLLLTATVYFSNHLFGMADTNLNYPIDDMSSSLDWVNIITFSLHKNSNVTTADAPLYDKDSHFSASYGVISWLDAGLPPCKLVMGIPLFGRSWFLRNKDKNGLGAPTAAAGTKQRKSNQIGVIAYAEIEEYLKSQSVFVTHDNQSVADYFYSGDLWVSFDSAVVVQEKVEFVAKSQLLGYFLSTISFVDSNYTLSKQASQSWNQYHVSSYAQGSFGIMQEGAIIQDLHASTGSPSSWYSKTLSYLLLSIILVLEVL

SEQ ID NO: 55709 - protein, 508 aa, Oryza sativa
MMKSLFLFSAHPKPPPLPPSPHLRKLLRLTASASTSASSPPRAGCSRGPAHARPRPSPRPSPSSSLYARPSLLDMERGRAARRADVDAFLASLGVDPGELAGLELPATVDVMRERVEFLHSLDLSNEDLAAYPLALGCSVRKNMVPVLDYLGKLGVRQDALPDLLRRYPQVLHASVVVDLAPVVKYLQGMDVRPHDVPRVLERYPELLGFKLEGTMSTSIAYLVGIGVARRQVGSVITRFPEVLGMRVGKIIKPFVEHLEGIGLQRLAIARIIEKKPYVLGFGLEDKVKPNIEALLEFGVRKEALAFIVAQYPDILGIELRDKLATQQSLFESSILVSSEDFGRVIERMPQAISLGRTAVLKHVNFLTSCGFLLSQVSKMVVACPQLLALNMDIMKMSFEYFQNEMERDLEELVEFPAFFTYGLESTVRPRHEMVAKKGFTCSLAWLLNCSDAKFDERMKYDTIGIEEMEVDNSFDTNTLSERVEDEVEDEDLDEDSDYDSTDDEFIE

SEQ ID NO: 55710 - protein, 848 aa, Oryza sativa
MSFLYGALSSGPGALALLESPTGTGKTLSIICSALQWLVDHRDAAARGSTTAAAAGGGGEGDGDEPDWMRDFTPLPPEKPTAKKGRPPAAAARSKAPRRAAAGSEKPEGSEEAEDEEFLVEEYESDGEVCVRREAGKRPHRGGGSSSESEADGEEEEEEEVTPKVFFTSRTHSQLSQFVGELKKTEFGWRLRTVCLGSRKNLCINKDVLKLGSANRINERCLELQKSKKSSKTKVEGDNRKVCQSKTSCGCPMIRKRGLQKEFKSEVSEQGALDIEDLAQLGKKIGTCPYYGARDMVRTADLVVLPYQSLLLKSARESLGLNLKNSVVIIDEAHNLADSLTSMYNSKITSSQLNAILSHLEAYLNRFQSVLGAGNRRYIQTLTVLTRSFLRVLTSNQDDACTMTSMTINQFLFSLDIDNINIVKLCQYVKESNIIHKVSGYANKLNINQDGVNHLSHQQQYDEGSSIASFQTLADFLRSLLNCNDNGRIIVARKKFSGQPEDAYLKFVMLCAEKIFLEITCDAYAVILAGGTLQPIEETRLRLFPNLPPSDIKFFTCNHIVPPESILPIAVTRGPSGKAFDFSYSSRSSHTMIEELGRFLCNVVTTVPEGVVMFFASYEYERFVYDAWAASGMISKISKKKHVFREPKNSVDVEMTLNKYKEAIQSCSKSSQDTGVTGALLLAVVGGKISEGINFSDGMGRCVVMVGLPYPSPSDVELTETIKYIENISKPVLVGGDNSSSSKYDDECKLQPGFDILRKCNKGGREYYENLCMKAVNQSIGRAIRHANDYAAMLLVDSRYAHTSSNRSSSSPTDKLPQWIKTRLACAQNYGEVHRLLHQFFKLNRQTH

SEQ ID NO: 55711 - protein, 200 aa, Oryza sativa; identical to SEQ ID NO: 32467

SEQ ID NO: 55712 - protein, 371 aa, Oryza sativa
MEKGFRSSSGGHSRWRCRCSGLPWRVSSQKRLLRPPSVGQPGSLWFGGWSRGAVCTPPCREWPAQIPSGPASHPDKAFTVSLKYSTLTMRGTALHRLDVCSHISSSAARLRLLLVSFICNLHASSGLGLVTRLRLLFLSLICDLHVSTEGSVDVVARLRLLFLSFIYNLHTSSRSLDIAARLRLPFLSFICNLHVSSRLSVDVVARLRLVFSCFICNLHICFSSLLQHLLRWLILHACFTSFNSVLGIFHHRIIFDIVATLRFFCCRLRLRLDVGISRRIVLISPQAALLDAAVPEQSPDEGDELPSVLEANLVCLSVPAGRNVHEQISPYTRQDLPPLLIVWNCFKQLPSQYRAFLYDGPVQFFQFSSFG

SEQ ID NO: 55713 - protein, 120 aa, Oryza sativa
MHKNRITGRKNDILRQQGLFTIEVMHRNCNLVIVTMITAVRSNAKYFLNAGNLSGWGIDVSRNRQGTNNRIAARGLHSDTALSCGSPNSLRITGHTSLATTNRDMVIPRVINGVTFTGPR

SEQ ID NO: 55714 - protein, 580 aa, Oryza sativa; identical to SEQ ID NO: 31501

SEQ ID NO: 55715 - protein, 117 aa, Oryza sativa
MAAALRGIGAKLGKVNHEKVTSALLLGSFVVLGWRSWEQQHEIDELEARKASLRAANTAMSSAMWAWREELFALAAAPSPPISASRLRVIYGEEQPPASPASKKPGADAEEEPFAIA

SEQ ID NO: 55716 - protein, 634 aa, Oryza sativa
MPSVLVDRATNDMLIGPDWAMNLEICDTLNRDPGQAKDVVKSIKKRIAHRNAKVQLLALTLLETMIKNCGDIVHMQVAEKDILHEMVKIVKKRPDFHVKEKILTLIDTWQEVFGGVRARYPQYYAAYQELLRAGAVFPQRSNGSVPIFTPPQTQPLQNYPASLRSAQQEPPGSSVPDLPSLSLAEIQNARGIMDVLSEMLDALDPSNREGLRQEVIVDLVDQCRSYKQRVVELVNTTSNEELLSQGLSLNDDLQRVLAKHDAIAAGVAVRLEKTKSLQTKIDSSPPANPGTSKAPVQSSSGTASASNQSTLALPAPASSSSPKAPAAPVPVIDLLSGDDYIKPEPANSLALVPVTEYSAADQNVLALADMFEQNNANRSNNNLTNSFNTSAPNSNFPASQAYPAPVQPALPQHPVAYSNGVSSNAIVPYYDDQNGGLPPPPWEIQQSMDNPPQPTQLGQMPLQPGQPVGMHPQSPHSGQFGQGSFMSPQQMANGQLGGTQPRQSPQPQSAPNLQYGGMMMYPNSMQVNQGAGMYSQPMFGGQFYGMSHHHQMYAVQMAGYGFGQQPGAYYIPNAAYAYVSANELTQRMNAVSVQEGNSHGGAMASRPEDSLFGDLVSIAKMKQNKPAAGKVGGL

SEQ ID NO: 55717 - protein, 180 aa, Oryza sativa; identical to SEQ ID NO: 30943

SEQ ID NO: 55718 - protein, 840 aa, Oryza sativa
MAAAVAMRSGSGSDGGGGGYDKAGMDSGKYVRYTPEQVEALERVYAECPKPSSSRRQQLLRDCPILANIEPKQIKVWFQNRRCRDKQRKEASRLQAVNRKLTAMNKLLMEENERLQKQVSQLVHENAYMKQQLQNPSLGNDTSCESNVTTPQNPLRDASNPSGLLTIAEETLTEFLSKATGTAVDWVPMPGMKPGPDSFGIVAVSHGCRGVAARACGLVNLEPTKIVEILKDRPSWFRDCRSLEVFTMFPAGNGGTIELVYMQMYAPTTLVPARDFWTLRYTTTMEDGSLVVCERSLSGSGGGPSTASAQQFVRAEMLPSGYLVRPCEGGGSIVHIVDHLDLEAWSVPEVLRPLYESSRVVAQKMTTAALRHIRQIAQETSGEVVYALGRQPAVLRTFSQRLSRGFNDAISGFSDDGWSVMGGDGIEDVIIACNAKKVRNTSTSANAFVTPGGVICAKASMLLQSVPPAVLVRFLREHRSEWADYNFDAYSASSLKTSSCSLPGLRPMRFSGSQIIMPLAHTVENEEILEVVRLEGQALTHDDGLMSRDIHLLQLCTGIDEKSMGSCFQLVSAPIDELFPDDAPLISSGFRVIPLDMKTDGTPAGRTLDLASSLEVGSTAQPTGDASMDDCNLRSVLTIAFQFPYEMHLQDSVATMARQYVRSIVSSVQRVSMAISPSRSGLNAGQKIISGFPEAPTLARWICQSYQFHLGVELLRQADDAGEALLKMLWDYEDAILCCSFKEKPVFTFANEMGLNMLETSLVALQDLSLDKIFDEAGRKALYNEIPKLMEQGYVYLPGGVCLSGMGRHVSFEQAVAWKVLGEDNNVHCLAFCFVNWSFV

SEQ ID NO: 55719 - protein, 340 aa, Oryza sativa; identical to SEQ ID NO: 35716

SEQ ID NO: 55720 - protein, 682 aa, Oryza sativa; identical to SEQ ID NO: 35729

SEQ ID NO: 55721 - protein, 660 aa, Oryza sativa
MNPLVDDLLLGGKSGLLVAMGPTGSGKTHTVFGSPRNPGLVPLTLRRIFSPTTHEPFSKLRSFCFSMFEILSEGKGERILDLLSDATDLVLQQSTIKGLKEVSVENFADAEALLFSGMLKRTTAATNANSKSSRSQCIITIRAVHKSSDAESENSLNNAVLTIADLAGAERERRTGNQGTRLLESNFINNTSMVFGLCLRSLLEHQKNKKKPLEKHFKNSMLTRYLRDYLEGRKKMTLILNVKPGDDDYLDTSFLLRQASPYMKIKYTNLEDSSGLVSQKRSSASLICQENTKKRKIHKVAGKDDIDKDDGVTISEKDESQYKLLNSELRRVSRNEEIMTNFARALWTVLKQYKQKLLESENAVESTRELLRSKDIEIMELEKKLKVLSGSCKKFPAVEDTFVEQNNDVSSGQVAQSLVSLSSQTDLVSMDSALNKSLPVEEVSEESTGHGPERSSDYDDKTGTGGSDVGDTSIIKLIAEEELCSGDCKPEKASSSDAFIPEHDVEKENIGIVVQVLDKKLDRSESCSDGGGVTHSSSSLDHPSDQSFTDTCLQNESANLSPPFIGASKKSPIEQSEEEREEIRNITTEGIQQNVHTRGVKHHSTPSCSQEVNSGSLHVSSSSVARDGCSSAGSSVRKMQANSRNNHCGIWLCSTSTCSG

SEQ ID NO: 55722 - protein, 665 aa, Oryza sativa
MEIVPVSGNSVFDSVNKVGGYGLKGPFSLGDSAVETMYRICVGCGKIESKEDPGLWRKWDSDENFIFSMSAARAISNSSNISYVSSDDSTSAPLRLYETARVTTESSVMDKKFNVSWSFNVDPDFDYLVRLHFCELEYDKAEQRKFKIYINNKTAAENYDVFAKAGGKNKAFHEDFLDAASPQMDTLWVQLGSESSAGPAATDALLNGMEIFKVSRNGNLAHPTVRIGGFNSAMGKPKRSPKWVLIGAAAGLVIFVSIVGVIFVCFYLRWKKKTSANKTKDNPPGWRPLVLHGATTPVANSRSPTLRAAGTFGSNRMGRQFTVAEIREATMNFDDSLVIGVGGFGKVYKGEMEDGKLVAIKRGHPESQQGVKEFETEIEILSRLRHRHLVSLIGYCDEQNEMILVYEHMANGTLRSHLYGTDLPALTWKQRLEICIGAARGLHYLHTGLDRGIIHRDVKTTNILLDDNFVAKMADFGISKDGPPLDHTHVSTAVKGSFGYLDPEYYRRQQLTQSSDVYSFGVVLFEVLCARPVINPALPRDQINLAEWALKWQKQKLLETIIDPRLEGNYTLESIRKFSEIAEKCLADEGRSRPSIGEVLWHLESALQLHQGLLQSANTDDLSQPELKLSDASCNLGCIEEVEESCRAGSQDVNEEYVDVKIEVP

SEQ ID NO: 55723 - protein, 820 aa, Oryza sativa
MKALELACLLLIIVPQVVLGTHDVYIVTMEGEPVVSYRGGVEGFPATAIDLDEDMEITSEAVTSYSLHLRRYHDKLLDSLLVEGTYEKLYSYHHLINGFAVHMSPLQAEFLRKAPGVKHVERDMKIQKLTTHTPQFLGLPTGVWPTGGGFDRAGEDVVIGFVDSGIYPQHPSFSAHKTDPYGPVPHYKGKCEMDPVTRRSFCNGKIVGAQHFAKAAIAAGAFNPDVDFASPLDGDGHGSHTAAIAAGNNGIPVRMHGHEFGKASGMAPRARIAVYKVLYRLFGGYVSDVVAAIDQAVQDGVDILNLSVGPNSPPTATRTTFLNPFDAALLSAVKAGVFVAQAAGNGGPFPKTLVSFSPWITTVAAGVDDRRYKNHLVLGNGKLLPGLGVSPATHENKSFSLISAADALLGSSATKYSALDCQRPELLNKRKIQGKILLCGYSFNYISGTASIKKVSETARSLGAAGFMVAVENSYPGTKFDPVPVSMPGILITDVSRTKDLIDYYNSSTIRDWAGRATTFQATAAIADGLAPTLYNSAPQVALFSSRGPDVKDFSFQDADVLKPDILAPGHLIWAAWAPNGTDEANYAGEGFARVSGTSMAAPHIAGIAALIKQKNPKWSPSAIKSALMTTSNTLDKGSHPLRAQQYSTSEIMTLTRATPFDYGSGAVNPKAALDPGLVLDATHQDYITFWCSIPDVEHSEVSNITGSTCSSSSKVQQRPYDLNIPSITISQLRGTQTVKRTVTSVAAEAETYTIMTRMSPEIALEVSPPALTVLPGASREITATLTARSVTGTYSFGEITMKGDRGHLVRIPVVAMGFK

SEQ ID NO: 55724 - protein, 232 aa, Oryza sativa
MPKRTTHTYSSEDALPEGPESDLFVYYCKHCASHVLITDTQLQKMPKRKTDRAHVLDKKKHLSRLNVKEAGKVLLKRGEGKLEKQFRMSCLGCGLFVCYRSEEELELAPFIYVVDGALSSVAAETNPHDAPVPPCITQLEGGLVQVAIEVEDRAQRSAITRVNAGDVRVTVAAPAARGEANNELLEFMGKVLGLRLSQMTLQRGWNNKSKLLIVEDLSARQVYEKLLEAVQP

SEQ ID NO: 55725 - protein, 174 aa, Oryza sativa
MDLQFPNGQLTYVAGEGITASGFLPLFGGLLQAHGKYPGETRVSFSCKNKQGTRFTPMFQWPDKSLSFGVTQALAWKRSGLMVRPSVQVSLCPTFGGNDPGVRAEVIHSLKEELNVMCGLSCSRHPSAFTALSIGRSKWNGQMGSSGVVVTLETPLNNIGRPSLCVQLNGGFEI

SEQ ID NO: 55726 - protein, 116 aa, Oryza sativa
MYQYCLPRHKNFNEYNYASSEAVSTKAIISFISLYLLFIWSLLNISELQFAGLTAGFIFKDTTQSKSCGKYFAFVFSSSLSSPRSFFYLRFSSCSETLGSTEQFKWNCSRDCCQPI

SEQ ID NO: 55727 - protein, 413 aa, Oryza sativa
MQAAAGRARRLLTSPAASGILSAPRPGCAALAGSGALLPRLDGVPSSPSPSPAPPLLARSFSATSSSRLPRNLLSPSISSQWRNEKSVCYHMAATHYSTEASDIDQPTEAVVELYQKMLKSVEAETMPPNAWLWSMVSSCSNKEDIKLLIQILQKLRVFRLSNLRIDANFNDHLCMKVAEACARVGALDYGLKVLWKHNVYGITPTIGSAHYLLKHAKEKNDTKLMGSIMQVLQRNSMPLQPGTADIVFSICYNADRWDLLSKYARRFVKSEVKLHGASFDIWMDFAAKVGDSQSIWNINSLRGKSVKRYNLATGFACVKGFLLERKPESAAAMIKLLHKHSPDEKKQLVTDELQKLVAEWPAEVIKRQKKDDRKALEEALITDIPQMISSMSKLRLDISVNLEKLTSQPETA

SEQ ID NO: 55728 - protein, 213 aa, Oryza sativa
MAAALRAALRRRHAASSPVARLLPYSSPGPCAKGGGAASTLHAATRGAPAPSIQAPSVVRRYCSAGGGYAAVRPARGASPLQVPSLVRRYGSTTGATATATPAAGVPALHRASPLPLFVPRRRRVYSSEEYSSDEYSSDGYSSGQEYKYVEDCQVAKVMDHQLRRIEKVEAGLKQLGWFQIITVSLLGLVTYQCHSEVSRLDKEVAAPKSEST

SEQ ID NO: 55729 - protein, 553 aa, Oryza sativa
MYRVKSESDCDMIHQEQMDSPVADDGSSGGSPHRGGGPPLKKGPWTSAEDAILVDYVKKHGEGNWNAVQKNTGLFRCGKSCRLRWANHLRPNLKKGAFTAEEERLIIQLHSKMGNKWARMAAHLPGRTDNEIKNYWNTRIKRCQRAGLPIYPTSVCNQSSNEDQQCSSDFDCGENLSNDLLNANGLYLPDFTCDNFIANSEALPYAPHLSAVSISNLLGQSFASKSCSFMDQVNQTGMLKQSDGVLPGLSDTINGVISSVDQFSNDSEKLKQAVGFDYLHEANSTSKIIAPFGGALNGSHAFLNGNFSASRPTSGPLKMELPSLQDTESDPNSWLKYTVAPALQPTELVDPYLQSPAATPSVKSECASPRNSGLLEELIHEAQTLRSGKNQQTSVISSSSSVGTPCNTTVLSPEFDMCQEYWEEQHPGPFLNDCAPFSGNSFTESTPPVSAASPDIFQLSKVSPAQSTSMGSGEQVMGPKYEPGDTSPHPENFRPDALFSGNTADPSVFNNAIAMLLGNDLSIDCRPVLGDGIMFNSSSWSNMPHACEMSEFK

SEQ ID NO: 55730 - protein, 445 aa, Oryza sativa
MEVVLHEGDAKDWVYKGEGAANLILSYTGSSPSMLGKVLRVKKILKDKGQPAPNCIVFSSHEEHLWGKIPGLLESVKNDCLPQAYATIVMSQHLGANHVDGGVRVRVSKNFFELAGKNVLDNRPAWRVNASAIDAGADSALLISDHTLFSGNPRGSSCIAVEIKAKCGFLPSSEYISKENSIKKQVTRYKMHQHLKFHLGEISKTSEYDPLDLFSGSKERIHMAIKSFFSTPQNNFRIFVDGSLLFGGMGGGADSVHPNETEKCLEDLSKVTGLQLSDFIELLSEAIFKSGVLGKLLATQKLDDHDIEGAIHLYYNIISQPCLVCKSITDTELLRKYSTLHSLPLDKSEKIVRDFLISATAKDCSLMISFRPRQSGTTDSEYDSVFLDSVNQSYDYKAYFIDLDVKPLDKMVHYFKLDQKIVNFYTRNGEVGGDPRDPPKGCGPR

SEQ ID NO: 55731 - protein, 222 aa, Oryza sativa
MGSPGAGSSGGGGGGHECSFKILLIGDSGVGKSSLLVSFVVAAAAAHLDDDIAPTIGVDFKIKFLTIGGKKLKLTIWDTAGQERFRTITSSYYRGAQGIILVYDVTKRESFTNLAEVWSKEIESHSSNKDCIKMLVGNKIDKEDERTVTREEGLAFAEESGCLFLESSAKTRDNVEKCFEELALKIMDVPSLLEEGSSSVVKRNILKQKQESQAKHGGGCCQ

SEQ ID NO: 55732 - protein, 800 aa, Oryza sativa
MVLPLEFLQQFKASDIPDPQEYEAWQSRNLKLLEAGLLVHPLVPLNKSDVSAQRLRQIIRGAYDRPLETGKNSESMQVLRSAVMSLAGRSDDGTSDGCHWADGFPLNLHLYQMLVEACFDNDDGTVVDEIDEVMELLKKTWGILGINQMLHNLCFAWALFNHFVMSGQVDIELLSAAENQLAEVAKDAKTTKDPNYSKVLSSTLSSIMGWTEKRLLAYHETFNTSNIESMQGIVSIGVSAARVLVEDISHEYRRRRKEETDVARSRIETYIRSSLRTAFAQRMEEADSKRSSRNPTPVLSILAKDIGDLAIKEKNLYSPILKTWHPLASGVAVATLHSCFGNELKQFIAGLTELTPDTVQVLKAADKLEKDLVNIAVEDSVDSDDGGKSLIREMPPYEAENAIANLVKVWIKERIDRLKGWVDRTLKQETWNPAANRENIAPSCVEMLRMVGETLDAFFQLPIPMHPVLLPDLMFGLDRSLQLFVSKAKSGCGTRNSFMPQLPPLTRCEVGSNILFKKKEKPQNPQYRGSQNGTTNGADPLALPQLCVRLNTLQFVRGELENLEKKRKTGLRNVESAQADVTDGLDIKFELCQTACQEGIQQLCETTAYKVTFYDLGHVLWDILYIGDIASSRIEILLRELDPILETISGMVHNKVRNRAITALMKATFDGFLLVLLAGGPLRAFTRQDSQIIEDDFKALKDLFLADGDGLPEELVDKASSQVKNVLPLLRTDSESLIDRFKRMMAESNRSGAKNRLPLPPTTGHWSPNEPNTVLRVLCYRYDETATKFLKKTYNLPKKI

SEQ ID NO: 55733 - protein, 224 aa, Oryza sativa
MATEASTSAAAGAGGGSWVEGMSADNIKGLVLALSSSFFIGASFIVKKKGLKKAGASGVRAGVGGYSYLYEPLWWAGMITMIVGEVANFAAYAFAPAILVTPLGALSIIISAVLADIMLKEKLHIFGILGCVLCVVGSTTIVLHAPQEREIDSVAEVWALATEPAFLFYAVTVLAATFVLIFRFIPQYGQTHIMVYIGVCSLVGSLSVMSVKALGIALKLTFQE

SEQ ID NO: 55734 - protein, 504 aa, Oryza sativa
MAQRRLLLAIMALAAVAAATGFEFHEATVDAIQLGFSNGSLTSTALVRFYLDQITRLNPLLHAVIEVNPDALAQAARADDERATGRRCGPLHGVPVLLKDNIATRDRLNTTAGSFALLGSVVPRDAGVAARLRAAGAVILGKASLTEWSAYRPAPNGWSARGGQTLNPYVRSFTPCGSSSGSAVAAAANMAAVTLGTETDGSILCPASLNSVVGIKPTVGLTSRAGVVPISPRQDSVGPICRTVSDAVHVLDAIVGYDALDAEATGAASKYIPNGGYGQFLRMDGFKGKRIGIPNGFFTQEIFEKKQLRAYQKHIQLMRKHGAMVIENIDIAKNLTEVQNVLFSNEHIAMIAEFKLSLNAYLSDLLYSPVRSLADVIAFNKAHPVEERLKDFGQPYFIEAEKTNGIGPVEKASIQHLNKLSADGLEKLMRMHQLDAIVTPNDNGRVFFAVSGMPAITVPAGYDSQGVPFGTCFGGLKGYEPRLIEMAYAYEQATKVRMMPGFKM

SEQ ID NO: 55735 - protein, 491 aa, Oryza sativa
MWKQFLGKISWKAPKSGGGGGGSPTAKSPLSKGAGNGEPPAPPAAAAGGGGGAEGETREDVFLRKLNVCCVVFDFSSAAAAAAAERGRDSPERERKRQVLVSLVDCVGAAEEPLTEAMISGCVRMFAINLFRVFPPKVRSGAAGAAEADEDEPFFDPSWYHLQAVYELLLRFVMSPVVDVKIARKYMDNSFVSRLLDLFDSDDPRERECLKTVLHRIYGKFMGNRPFIRKAVSNIFYRFVFETDRHNGIAELLEVFGSVISGFAKPLKEEHKLFLWKALVPLHKPKTVGVYLPQLTYCIIQFIEKEPKLAGTVIRGLLKYWPVTNSQKEMMFLGELEEVLELTEMAEFQKCMVPLFRRIAHCLNSSHFQVAERALFLWNNEHLFDLISQNRQTIMPIIYPALERNTRWHWNQSVLNVTMNVRKMFLEMDEGLLLTCQRNFQEEEEKRAASEERRKLIWENLERNASFRPVTGDIGFSVLPASAPLVAPTMT

SEQ ID NO: 55736 - protein, 204 aa, Oryza sativa
MGHPHPHPYAPAELHLPGFVPLQLSQAQILVPYLATSLFLLLAVWLISGRCSRRLSDTDRWLMCWWAFTGLTHIIIEGTFVFAPNFFSNQNPSYFDEVWKEYSKGDSRYVARDPATVTVEGITAVLEGPASLLAVYSSFLPFHLTMRTLPLSLSLSLSLSLSLSLSLSLSFPFLTYLTIFSLQMHFSHVFLPFVILLFFFPLSS

SEQ ID NO: 55737 - protein, 385 aa, Oryza sativa
MDGEQLMSGELDNSFNALMVSGEGESGQAHHEGTGTTLLGWKDLPMELLLRILSMAGDDRMVIVGSGVCTGWRDTLEWGVTNLSLSWCQAHMNDLVMSLAQKFTKLQVLSLRQIKPQLEDSAVEAVANNCHDLRELDLSRSFRLSDRSLYALAHGCPHLTRLNISGCSNFSDAALAYLSSQCKNLKCLNLCGCVRAVSDRALQAIACNCGQLQSLNLGWCDSVTDKGVTSLASGCPELRALDLCGCVLITDESVVALANGCPHLRSLGLYYCQNITDRAMYSLAANSRRVRSKGRSWDAAARKNAGAGADGLASLNISQCTALTPPAVQAVCDSFPALHTCPERALPHHQRMPQPHLRPLRLRSPPAPPWEGHPLQPCLLASSLL

SEQ ID NO: 55738 - protein, 141 aa, Oryza sativa
MAILILLQLHNVSLMSMQVVLWITITRMKTISTIREKGEKYGHVNFIASLDSKEELFFAEVCWDPKNYDMVPTCIVSLEEKRRIGGRSFINDEYVVCLDLQNPPIDGKHCYGCSEEIKHPEDGSTFKAGHVAATGFYDSFM

SEQ ID NO: 55739 - protein, 440 aa, Oryza sativa
MYMLSRKKPRSITIKFYSGHNYKIPSNLFSLSDLEYLQIKRCIIGLPQEFEGFKRLTVLNLKYFSSTDSDINNLISSCPLLSTLCLKYFEGITCLSIQAPALQDLEVKGNFQDFHLHAPNLSNLDVSLDKTEAQQSVVVEGNRKNYLKQAMVSLTSIVRLVMKRCIIALPQEFEGFKQLFVLNLKYFSSTDHDINTLVSSCPWLNTLRLKHFDGISCLRIEGQVLQIVEVEGKFEDFHLNAPNLSHVYITLDKTEAQQSVAVVGDMKNYMKQAFVSLTSIEELTISGSFLTYLSKGCLSMQLPGVFDHLKKICIEKCFWNWTEVLGACSIFQNAPTFRELEIWSFPRPEAYRRKTIWDQDQTEIEEPTLHHLVTVAINDFVGLNCEVALVGLLLSWSPALEDLKIFRAKNVNDEYMCICKGLTKLLALPRASSKAKITVI

SEQ ID NO: 55740 - protein, 743 aa, Oryza sativa
MSAGWRTLLLRIGDRCPEYGGSADHKEHIETCYGVLCREYEHSKDAMFEFLLQCADQLPHKIPFFGVLIGLINLENEDFSKGIVDTTHANLQDALHNENRDRIRILLRFLCGLMCSKVVLPNSIIETFEALLSSAATILDEETGNPSWQPRADFYVYCILASLPWGGSELFEQVPDEFERVLVGIQSYISIRRHFDDIAFSVFETDEGNSPNKKDFIEDLWERIQVLSRNGWKVKSVPKPHLSFEAQLVAGVSHRFSPISCPPPTISQSSSEIVKGQEKHEADLKYPQRLRRLHIFPTNKAENMQPVDRFVVEECILDVLLFFNGCRKECAFYLVSLPVPFRYEYLMAETIFSQLLLLPNPPFRPIYYTLVIIDLCKALPGAFPSVVVGAVHALFDRISNMDMECRTRLILWFSHHLSNFQFIWPWQEWAYVKDLPKWAPQRVFVQEVLEREIRLSYFDKIKQSIEDAVELEELLPPKAGPNFRYHSDEGKESTDGHRLSKELVAMVRGRKTQGDIISWVDEKIIPVNGAKFALDVVSQTLLDIGSKSFTHLITVLERYGQIISKLCPNEEMQLLLMDEVSAYWKNSTQMIAIAIDRMMGYRLLSNLAIVKWVFSPANVDQFHVSDRPWEILRNAVSKTYNRIFDLRKEIQTLRKGLQAAKEASEKAARELEEAKSIIEIVDGQPVPSENPGRLRRLQARADKAKEGEVTTEESLEAKEALLARGLEESKELLRLLFKSFVEG

SEQ ID NO: 55741 - protein, 377 aa, Oryza sativa
MELLQEKNIHVSQRDDKAKWIIDNYSNIRSFTEHDIEKITSNYSTLIGKGGFGEVFRGVLDDEDDVVAVKRYIRGDLREEFMEEIRIHAQMSHKNIVKLIGCCIGKNRLMMVTEFISNGNLEDALHNSDIFIPLSTRLGIAMGCAKALSYMHSMHLSSSSLICHGDIKPANILLDANLTAKVSDFGISKSLSGGITRWTSNVKGSIAYMDPIYYREGRVTSKSDVYSFGAVLLELIARKSMKEGGISCEAFRQACAKGKGLRELLDIEIAEECNMNILEEIAKLATKCMIVDNIKKRPQMNDVAEHLRTWIFQVRNGGHEKPAWESTLDKVHDALKKGTSSNFWVIVPMLIIFLFSYMSMLLKGASMTFCTLKKISH

SEQ ID NO: 55742 - protein, 153 aa, Oryza sativa
MGSVMGSLALAYHDAREFRMETKRKAEHEVNLLRPPALLHWDGGDGEQPPPLDERRRIVQRWIEYEKRKGPRRFEYLPGLVQPKSLSPLIRYCTSLCSFSLFVLINHVKRSVEIYHVCERKKIGNCKIVLYVNDLKKSSKISNAQLSCTILII

SEQ ID NO: 55743 - protein, 218 aa, Oryza sativa
MSEDYRRNCQCPHVVQQMVLINIKDMLRSMGKDIRSFPLPGVDMLHDTTNGVPKEIIEESMIKVDPEDTALCNSLNTEQRAAYDEILATVDHNEGGLFFIDGPGGTGKTFLYRALLATVREQGKIAIATATSGVAASIMPGGRTAHSRFKIPLRIDDGAICTFTKQSGTAKLLQMASLIIWDEASMTKRQAVEALDNSMRDIMDKPNLPFGGKTVVWR

SEQ ID NO: 55744 - protein, 592 aa, Oryza sativa
MAATAAAAAGVAVAGDRARRRQWRYTWESLAHLPLLRLYLFRPELSAAAAADHLRADLRLDDSLLLLSFSLAGEPVALRVPVPRVLVDPSAPPECRDAGDHVEVRLALVLPVDHPVVAAAFLPPPGEEPPAPLSLRDDIKNLSSGDVHLYCKACSARLTKQPLRNIEEMPSLNWEDVADNWFGGCCTSFGGASEKLVSQYINAYGRLEGTSLLNATSISIEKDYLEKDLASGLVSSVPSNDCDALQEDICDVHIGEDHTTGNMEFNSSEEKAYHEKQIGCNHVQCSVVPEEGPCVSNSEKDGDTLWTDQSGIIKVNPEESKNDSCVDDIEKPTKETDLLSVDPCNCCCDGGNSRKSEDNPSNVPSGNLEMQAKLDTQRDYKLTKSISLGCSFIVKASNLVNDVEWLELLCAHCSSPIGSYPSQHSHAPADGRVRLFKCYASSDLHVGGPHDVFRGHTLERLFVNLLLEVAEDEISFRTLVRDLKTKRPILQIVLLSSKAWLFSGYCYENDMDGSHGAAHLQPSVKILYSNCSNALEEDLRTVEEWSSKYRAEELYMMRRQIDELILSLNSARDNFPLSCSSLQGMYLSSLER

SEQ ID NO: 55745 - protein, 578 aa, Oryza sativa; identical to SEQ ID NO: 35348

SEQ ID NO: 55746 - protein, 177 aa, Oryza sativa
MPLLPSPLGSLSAAATAAPRRAAAAAGLSPLLLRRRAPIAGALLFLSLGAFAGVRSLSSSASARMESTSTTVPSIVVYVTVPNKEAGKRLAGSIISEKLAACVNIVPGIESVYWWEGKVQTDAEELLIIKTRESLLDALTEHVKANHEYDVPEVIALPIKGGNLKYLEWLKNSTRES

SEQ ID NO: 55747 - protein, 233 aa, Oryza sativa
MLRLQNHLLPLLRASSSSSPVHLRRLIPSTAAASSSSSVHPNRRLHSTAAARSTTTATPFSMEDYLVDTCGLTAAQALKASKNVSHLKSATKPDAVLAILSGVGLSGADLAAVFAAEPRLLCTKAPSVALRVASLRHRVGLSDPQIASLLLLPGGAKGFHTCDMAPRLEFWIPFLGSFEMLDLEEEQRDCQLEPREGYQAQHRAAPGVRAKVFVILSRCPRRPRGSSRSAQRD

SEQ ID NO: 55748 - protein, 86 aa, Oryza sativa; identical to SEQ ID NO: 54198

SEQ ID NO: 55749 - protein, 852 aa, Oryza sativa
MRGGGGRGGGGGGGGRVPFYAAAAAAEPASRKLVQGLKGILTDRSEAEIYATLLDCGMDPDVAVERLISQDPFHEVRRKRDKKKEIKAPQETRPRPFYKPAFRGSKTGGDSTGSGKGPTKKETELHSLPKSSVSDSVKESNPTEKISAADHATINDSLILSSGQADAKSTPLQPPSQVKHGWGGMPGRPSMADIVKMGKPQAKPVRSVACNTGMPTIGGSVISNATNHTSKDSQDLVLPSQVNSVATDRIPNGTNEVSPASNDSSIDVLPPREGLEVPESVATVKPGSSTADVYKDEVEEDMDSDKNKDMSASNADDRTSSGPYPASSKEVHSEHTQIATHHNDLIVETEDSQSDGNAFENNRVADSEGNMSATDKQFEQLILHEEKKSKSSEDNPAVIIPDHLQVSNADCAHLTFGSFVSGTLDAPVSLKTANGDEEVAAVSDNHSIDQSDVRIHEYENKDTVAPAADEHVASSTKSDTENVDVAPVQQPELRTADLIDVPNNTMYNNLSTSDYATPSAVRPDSSAHIYLQEHRQLQNISPLSSFMQGNIPNGLLPPALPPLRDFDPAFSLLLTNPPLATMVHGTTSSSMGNATTVSTQPQEIVNPGASSNPQLNQSQPSTSTSIASGPPLPQHLTLHPYAQATLPLGYASMIGYPSLAPSYTYLPPPAFQQPYMNSGLFHQAAAAVPNSSVKYPLPQYKGNVSLASLPQQASLLSSYVGGFGAASSMPGNFALNQSTPSATAAPGFDGTVPAQYKEGNQFVSLQQSENAAMWMHGASSRTMPPLAANALYYQGQQGHQGGLRQGQLPSQFGAPLAPTQPGLGHEHRNPSDGNLSSAAAAAQANQMWPNSY

SEQ ID NO: 55750 - protein, 304 aa, Oryza sativa; identical to SEQ ID NO: 35261

SEQ ID NO: 55751 - protein, 348 aa, Oryza sativa
MYFTNDDPHSARILFDSITQEDVIMWTEMVAGHSSLGEGELALRYFVSMLQEGYKVDSFSLSSALNSTTELAGLKQGEMLHAQVVKSGYEGNICASGSLVDMYAKNGALPGAYLVFRNIQRPDLKCWNSIIGGYGNHGNSEMAFKLFGEMIRDGLQPDHVTYISILSACSHCGLVEKGKFYWFCMMTDGIVPGFKHYTSMVSLLGRAGLLDEAVDLMMKSPFAKKCPELWRILLSSCITFRNLSIGVHAAEQALEQDPDDISTHILLSNLYASLGKWDFVAEIRKRMRGLMADKEPGLSWVEMKNVVHVFSADDECHSHIDDCHSELLRLKGNMELLDTCENEFMSSG

SEQ ID NO: 55752 - protein, 318 aa, Oryza sativa
MASAKAMAQDEHHFVLKSGHAIPAVGLGTWRAGSDTAHSVQTAITEAGYRHVDTAAQYGIEQEVGKGLKAAMEAGINRKDLFVTSKIWCTNLAPERVRPALKNTLKDLQLDYIDLYLIHWPFRLKDGAHQPPEAGEVLEFDMEAVWREMERLVTDGLVKDIGVCNFSVTKLNRLLQSANIPPAVCQMEMHPGWKNNKIFEACKKHGIHVTAYSPLGSSEKNLAHDPVVEKIANKLNKTPGQVLIKWALQRGTSVIPKSTKDERIKENMQVFGWEIPEEDFQVLCGIKDEKRVLTGEELFVNKTHGPYKSASEVWDNED

SEQ ID NO: 55753 - protein, 362 aa, Oryza sativa
MLLGLEKNQHNGEDTSPEANDSGELDDQRSMECSTSTEMSSNSGHRSRNRAQDDDSFDSESSSSGPPTVKRPAAVTALLPPFSRPTPSKWDDAEKWISSPTANRGGRVGSAAGAAPKKSALAFPEHVSRPPAVAKVVAEVPINTGTLVKNSVALAQPISFNPAQSASIVDEPAPAVRSVSMRDMGTEMTPIASQEPSRTGTPIIASSPTSSRTPTPQRNAEISIGEFGPNKMEMSEEELQMNTRKEIMDLGQRLGKTTIAAWASKEEKSTTSFANVITDKAVEIDREARAADWEEAEKAKYLARFQREEVKIQAWENHQKAKIEAEMKRMEAKIEIKRAREQDRLSSKLAAARQGRGEEGGR

SEQ ID NO: 55754 - protein, 619 aa, Oryza sativa
MPHPSAAAMLPSPSSLLRLLRRPHPRLLPPPPPLLTRFLSSSSPGDAAGWASYDPLTDSLAPPAAAAAASDSEAPAEGEAWGVFDAVTGRIVMKEHPPYSQPPPPGPDEERSKVGRRRSAGVKDEARWSSVAAVGKARGKAGKERASYVCGNCGEGFSQWWGTCRHCEAMGTLTKYVPGSDPGASVGSHHAFRSWIPQKSKEMVPQSLQQVTKGVDQSEWRIPLSGNFGMEIARVLGGGVVPGSLILVGGDPGVGKSSLILQLASIMSENIGAGESSAIVYVSGEESIEQIGNRADRMSIKSRNLYLYSSTDIEDILDKIQPLSPRALIIDSIQTVYLRGFAGSAGNMTQVKECTSALLRFAKLTNIPVILIGHVTKTGDIAGPRLLEHIVDVVLYMEGERCLSHRLLRSVKNRFGSTDELGVFEMSGYGLQPVLNPTEMFLTEHDLDSEILAGLAVAVVLDGSRTFAIEVQALCVSGSPRNGEVVGIPRNRADIIISVLMKQAGLKLQDNAVFLNVVSGFMLTETAGDLAIAASICSSFLEYPIPNDIAFIGEVGLGGELRTVPRMDKRVLAIAKLGYKKCVVPKTSEKLLRPLNLELEILPCSNLKEVINTVFRPQG

SEQ ID NO: 55755 - protein, 503 aa, Oryza sativa; identical to SEQ ID NO: 55145

SEQ ID NO: 55756 - protein, 142 aa, Oryza sativa
MKHTTNARWAHIVCALLVPEVFFRDPDDHDGVDCLSYLALFAALWLSPPASPPRHLHRCRHLPLFRRLSLFHLRCCLLWCHRRRRRRLPHVGRCRRLTILHQSSPRRDRSSLLFSRHISQRGARDHQVRRPRPPYRRIQKPG

SEQ ID NO: 55757 - protein, 523 aa, Oryza sativa
MTPARVVFICCVVLLAAAAAAASSSTAAGITRADFPPEFIFGAGSSAYQVEGAFAEDGRKPSIWDTFSHSGYSVDGATGDVTADQYHKYKEDVKLLQDMGVDAYRMSISWSRLIPDGRGAVNPKGLEYYNNLIDELLSHGIQPHVTIYHFDFPQALQDEYNGILSPRFVEDFTAYADVCFKNFGDRVKHWSTVNEPNIDPIGGYDQGILPPRRCSFPFGVLSCDNGNSTTEPYIVAHHLLLAHSSAVSLYREKYQATQGGQIGLTLLGWWYEPGTQDPEDVAAAARMNDFHIGWYMHPLVYGDYPPVMRKNVGSRLPSFTAEESKRVLESYDFVGFNHYVAIFVRADLSKLDQSLRDYMSDAAVKYDLPFLKSNNEFPLGLTSDFMTSTPWALKKMLNHLQEKYKNPIVMIHENGAAGQPDPSGGNTYDDDFRSQYLQDYIEATLQSIRNGSNVQGYFVWSFLDVFEYLFGYRLRFGLYGVDFASPERTRYQRHSARWYAGFLRGGELRPAAAALAGGGAYSQ

SEQ ID NO: 55758 - protein, 250 aa, Oryza sativa
MGRAPAKRKPSSPPPPPPPGRCHFWLPNKRRHCANTPLPTSQYCGNHLPDSASDAGAPFRRLVPCPVDPSHTVLEENLEAHVGKCPLKKQAAALAAQPFYSKGINSGGGEGGGGVTSAAKRALVHKLTKDELRALIEKIKLAHASAAMAMRDSFLVTDACDNWMRNQVDRKVPYQEKHVTQQASIIGNMEAFGLLQKGGEVAEENGVKNAPAVVEFGAGRGYLTQMLADCYGIRNVFLVERRSYKLKLKI

SEQ ID NO: 55759 - protein, 208 aa, Oryza sativa
MAAAEAAAEAAAALEGSEPVDLVKHPSGIIPTLQNIVSTVNLDCKLDLKAIALQARNAEYNPKRFAAVIMRIREPKTTALIFASGKMVCTGAKSEQQSKLAARKYARIIQKLGFAAKFKDFKIQNIVGSCDVKFPIRLEGLAYSHGAFSSYEPELFPGLIYRMKQPKIVLLIFVSGKIVLTGAKVRDETYTAFENIYPVLTEFRKVQQ

SEQ ID NO: 55760 - protein, 260 aa, Oryza sativa; identical to SEQ ID NO: 30348

SEQ ID NO: 55761 - protein, 245 aa, Oryza sativa
MAAEVAKAAVVPESVLKKRKREEQWAADRKEKALAEKKKAVESRKLIFARAKQYAQEYDAQEKELVQLKREARMKGGFYVSPEAKLLFVVRIRGINAMHPKTRKILQLLRLRQIFNGVFLKVNKATINMLRRVEPYVAYGYPNLKSVRELIYKRGYGKLNKQRIPLQNNKVIEEGLGKHDIICIEDLVHEIMTVGPHFKEANNFLWPFKLKAPLGGLKKKRNHYVEGGDAGNREDYINELIRRMN

SEQ ID NO: 55762 - protein, 172 aa, Oryza sativa
MLGELLTEDDQKIFKHLESIDVDDSEDIKSGYSITLTFSPNPYFEDTKLTKTYSFSDDEAVKVKATSIRWKKGMDIANDRAYTKKGDKRILIDESFFTWFNSEKNRSFAHGAMDEVADVIKEDLWPNLLKYFNNEFEEELELLDDDDEVSDDDDEEEDDEDQGEGEEDGEEN

SEQ ID NO: 55763 - protein, 801 aa, Oryza sativa
MNPLPPPASRLWEASIRKLKYSTILRGSVVPSGAAFDGAAAAATGGDPVTLTPSLSVSSSTSNTIYQYEDGDDDIDSVLDDVDTDDDDVDEASLGEPSHSDQLLPSGDFYQGDLRGDLPHGAGKYLWTDGSMYEGSWRGGRAAGRGKFSWSSGAIYEGDLAGGYMHGQGTYIGELGDTFAGLWANNLRHGRGTQAYVNGDVYDGHWRDGLQDGHGRYIWRGGHEYIGTWKAGEMHGRGTVIWADGDRYDGAWEDAKPKGQGTFRWSDGGMYIGLWCQESGETQGKGVYYPPSGGPAVPLPREPKEVITKLLEELEMSEGKTVSLLPSQKVLTWPGVEPVTKKPVWRPPEVAADQGMWRPPEVGADQGRRSSRRNSMSSDIDSLVEGEDGGEETRNDRSWVRTPSCMRAPTLPKPGKKQGETISKGHKNYELMLNLQLGIRHAVGRQSAPASLDLKSSAFDPKEKVWTRFPPEGSKHTPPHQSCDFRWKDYCPLVFRTLRKLFDVDPGDYMLSICGDDALLELSSPGKSGSFFYFTNDDKYMIKTMKKAEVKVLLRMLPAYYKHVRSFDNTLVTKFFGLHCVKITGAIQKKVRFVIMGNLFCSNYSIHRRFDLKGSSHGRTTDKPLDQIDETTTLKDLDLNFIFRLEGSWYEDFCRQVDKDCEFLEQERIMDYSLLVGVHFKDRCKDSSSPDNETTQTALEDEEKRKAPVKLGIGMPSRVENVVKNPESESQLIGEPTGEFQDVILFFGIIDILQDYDISKKLEHAYKSMQYDPNSISAVDPKQYCKRFRDFIYRAFSEDVQ

SEQ ID NO: 55764 - protein, 497 aa, Oryza sativa
MTMATSREVFKYHPLPTPGVENSFKDEIQSKVLGTIGDVMNSFDPKSFPQHVEGALGTAGNIINSFESKLAEHKQFDFGGKTNFYGYDCADDGWGSAPLKADKPVNLRNLLGGLIAIISRGGKNSEIQPPKDTKSSVAFLGSGSDGETFLHASVYVPSAPPLLDEEALNYNVYRVVIEAEPPEWLPDSYANSCMQCAASFTVVTRGRHHCRFCGGIFCRTCSKGRCLLPAKFRERNPQRVCDACYDRLDPLQNLFINSISNATQTAKHDVMDWTSTRGWLNLPIGLTMEHEIYKAANSVRSYSQIARLNPERSIPHAVLSGASGLAILTVVKAGALLTYKLGTGLVVARRSDGSWSPPSAIVSVGLGWGAQVGAELMDFIIVLRGLEAVRTFSSQMHFSVGAGLSAAAGPVGRVLEADLRAGDKGSGVCYTYSCSKGAFIGVSLEGNFVATRRDANLRFYGDPYLTTSDILMGDMQRPNAAKFLYTALDGLYSGLSR

SEQ ID NO: 55765 - protein, 385 aa, Oryza sativa
MMRNNQNTQVEGASATKKRKTSYSNSNREDSSPVVDGLTRILRRNLLPRGYPMPSEFTDGMHMVNNFEESFGDLDDCNEEYSKVNLVALRISQSVVSLASFKGRTRLFACTGTIMEYGPSKMSILTSASLVRCTKDENKTDEKLKIKVRLPNGKLTEGKLWNYDLYYNIAVVKIKYFPELSTAQIHNQGQSNVKLSQSKLVAVGRGYESGELMATGGTLLYKPSKLDCKELMTSTCKITKAGIGGPLVGFDGNFVGMNFCDKKETPFLPINIIRKCLKHFDMFGRVVQPWLGLRIGSLKHEKLDIREQIHGSFSNTGGIYVKEVFDGSPAADSGINVGDVITKLDGVDLFHAQEFYELILGKSEDILRRDEEMLFKVSILRPSNG

SEQ ID NO: 55766 - protein, 588 aa, Oryza sativa
MGFFFFASRAAARFLGEARIIHPGVSTAALLVAAASGGGLVAYADSAGENASSETSQEAPRKKKVVVLGTGWAGTSFLKDLDCSKYEVKVISPRNYFAFTPLLPSVTCGTVEARSIVEPIRKMLEKKRKDVAFYEAECFKIDASKKAVHCRSAVGTNFDGNGDFMVDYDYLVVALGATVNTFNTPGVMENCYFLKEVEDAQKIRRDVIDCFEKASLPNISEEEKRKILHFVIIGGGPTGVEFAAEMHDFLVEDLVKLYPAIQDFVKITIIQSGEHILNMFDQRIATFAEMKFQRDGIEVNTGFRVVKVSDDLITMKSKSLGEVSVPYGMAVWSAGIGTRPVIMDFMQQIGQTNRRVLATNEWLRVHECDNIYAIGDCASITQRKIMDDISTVFKMADKDNSGTLTLKEINDVLEDICIRYPQVELYMKSMHMLDIRDLIKDAIGDSHKESMVVNIEEFKKALSHVDSQVKSIPATAQVAAQQGHYLAECFNKMDQCKEHPEGPLRMTGTGSGRHNFRPFRYKHLGQFAPLGGEQAAAELPGDWVSMGHSTQWLWYSVYASKQVSWRTRMLVVSDWTRRFIFGRDSSRI

SEQ ID NO: 55767 - protein, 281 aa, Oryza sativa
MKSMFQLLEEKPGIKDEPHAQPLQFKGGRIEFENVHFGYVPERKILKGATFTVPAGKSVAIVGTSGSGKSTILRLLFRFFDSSSGSIRIDGQDIREVTLDSLRKCIGVVPQDTVLFNDTIKHNIQYGRLSATDEEVYDVARRAAIHDTIMNFPDKYNTVVGERGLKLSGGEKQRVSIARVFLREPSILLCDEATSALDSTTEASILNSLKTLSVDRTSIFIAHRLTTAMQCDEIIVLENGEVVEQGPHDFLLSKGGRYAELWSQQNNSDAIDAAAVSLEVS

SEQ ID NO: 55768 - protein, 354 aa, Oryza sativa; identical to SEQ ID NO: 28662

SEQ ID NO: 55769 - protein, 388 aa, Oryza sativa
MSTTSSSKTATCPLCHADVLLPRRRSAGSSTHRSHDLDDGPAPPSPESSCRSNAAVCGCARCRRPDLISPGTGMRMRNRFGDGPNRISAQSGAWLCRERTAETCRSTSSRSGRYRRLQPAAVAGTRRAELIKRLQELCHPANNLPNCSASWQPQRQRQKTIDRIPDSLDCGVTMERGKNKRDGSDNGLIFSNLMHGVAAGIYGYPPHQGYTQAQSYLLLPEAYPPPPWTYPLSSAYPPQPVGYPSGGYPPAVYSDSYLHQGSRVAREQCPLSYSNNAVTCREDGQMNCENGTVNMEKSAMSSNKMATSLLKSCGNVMPCRNMERSGPAMYKVDMRGSTKQFSMGSKMMMCLIVFGCLIAALDMFRNVAQKQMFSVVSLLSFVVATYVC

SEQ ID NO: 55770 - protein, 70 aa, Oryza sativa
MIFWKHNVLSEMCKMSVAFPVLMHPHLKLLHLFWVHLFQGMPHQILIMSLGSLVLAFHLSVLGLILMRRS

SEQ ID NO: 55771 - protein, 472 aa, Oryza sativa
MRNLHPPMMKMLLAALVVVAAASFRAAEAALPSMAVGVNYGANADNLPPPKDVAAFLAAHTTIDRVKLFDANPAFISAFANTPISLAVSLPNSDLPSLADKQTGLDTARAWVRANLSPYVPATNVTLLLAGNEILLSPDPNLVLSLLPAMRRLAQALRLEGLTGVRVTTPHYLGILAPSDGIPSNARFRPGYDTKLFPPMLQFHRDTGSPFMVNPYPYFSYNNQTLDYALFRPNRGVYDPNTKLNYTSMFDAQMDAIYTAMKRLGYGDVDIAVGEAGWPTQADPGQVGVGVEEARDFNEGMLRVVSSGKGTPLMPNRKFETYIFSLFDENQKPGPIAEKHFGILNPDFTPIYDLGLLRQSSDSGAPNPSPNPSPNPSPKPAPSGGGKWCVPKAGASDTDLQNNINYACGYVDCKPIQSGGACLDPNNVQSHAAFVMNAFYQANGRHDYDCDFKGTGAVTSNDPSYGSCKYVS

SEQ ID NO: 55772 - protein, 658 aa, Oryza sativa
MELTCSSEESNSKENSVNSSSSPIESSGPFVYYPTPPATKDDAGNSSDHEKPNAHSEKSSQPVILKYSNGLTDHVGCMDSPSSIVERSLLDSTKPHMESNSATDAIPEILSNSGLSEAFNHSVKDEADGSSEDALEVNHLSDNVSAGAETMLTDEMNSKEDRIDQKNVAVKPKMVEEQGAAPGSPYKGLIDTAAPFESVREAVTKFGGIVDWKAHKAQMMERRKFIQLELEKVQKEIPLYKEELEAAEMVKSQVVNELEDTRRIIEELKHNLEKAQVEEVQAKQDSELALLRAQEIEQGVADEASVIAKTQIEVAKERHEKAIAELNSVKEELKTVHEQYVTLINERDTAIKRSEEVISVGKDIEKRVEELTLELIASKGSLELAHAAHHEAEERRIGAALEKEEDCVAWDRELQQAQEELQQLNNKLLSKSDVKQNLDTNLRRLRSLKSELATYVQNVISEEAEGLVKEHGPDDAQQISGPVKEALASAQKELEEVRANIEKAKNEAKLFKLAATTLRSEMANEKSSLVELQQREGMASIAICALEAELNRTKQEIEYVKSKEEDAQERMVELPRILQEAAQEAEDAKMVAFSVQEQVRKAREETEKTKTAAATVNTRLSAVLKEIDASKASKKLAFAAVQALQESEEAGDDENSPR

SEQ ID NO: 55773 - protein, 684 aa, Oryza sativa
MSSRRGGGGRRGRGRGRGRSALAENDMDFHETSALSSPSTTSDKEDNIEFTSQQPCLVSPAAEHVSNTLLNPKINHRSDAIFGDQAVEQLKLRHHKPLKFHERYRPYLRDAGLLGLSQICQKMPQLDKALITALVERWRPETHSFHLASGEMAVTLQDVAMLLALPIDGRPVCSTTDHDYAQMVIDCLGHDPRGPSMPGKSFLHYKWLKKHFYELPEGADDQTVERHVRAYILSLLCGVLFPDGTGRMSLIYLPLIADLSRVGTYSWGSAVLAFLYRSLCSVASSHNIKNIGGSLLLLQLWSWERSHVGRPLVRSPLCPETDIPQDVPPVGFRWVGARTQSENATRCLKQYRDELNLQRADQVKWEPYLHIESSSLPLLCTKDADLWLTQAPLINFPIVEMYLPERVMRQFGLRQSIPPPFRPTLQALHRISRRGREHENWEETHHEYIQEWEARRQRIFPESEQYDPSSYEEYLHWYSGVTRRYLVPSISDDVEAGPSLQPDDSIDLQYQAKAPMIRKAVDKLHGMVKKAKMAMTSTADTTTQALVFEFLHGFQDVLHDLGEIKENGGSATSPHVESAAAQDMPLLLLEAEQNIVDADQEAQHQEEEELHMVDDATMTLEPMDEEDNGFNNVICPCPSLELEEHSHSATPAIDECDTATPAPGSAIPQQSTSVDQDGHLENPN

SEQ ID NO: 55774 - protein, 578 aa, Oryza sativa
MARKRRAPTPPHPPPPPPEAESSADSSGEEEEEEEEEEEERESPVAPPPQKPSGRGAASSDEEEEEEEDSDTDTYAQGFQLRKVGGGDEEGEEVEGDSSESEPEPEPVKKESAKKAKAEAKKKRAAPEPAPSGKAKKAKPEKSSSAAAPEPAPSSGKSKKAAKAEAAKAAAAEPAPSTGKVSKYNLAPEPSPSSKSGKALSRWTTDDEVKILEVLVAHFKSHGTQLKVEGIIAAVGDSLERKSIKYSDMYEKVRRLKQRYEATAKKVEHGGDLPAKEDDLRMYQLSSEIWGKNAKDAGNSSKNKKGQAKKDKVSGDSKEAAKEDKVDEAAIAVNEKGGTLAENKKGKTNKQKTGMETKVGSSKEAALAASPTKGKKKGSHKDKLDEEAKSGTAKVTSTIATDDDDGTLGGSKREKAGKEELDGDTHIVMPKEATTTAASDDGTLVGSKKGKADNGKLDGDTHSVMPKEATAGTQNGGILTGGENHKEKVDKDANVPSIRREYAELQSLYPNLASFVNGIEAQHPCGSTFKRAFEFISDDKACTLESKIKKQKIAEVRMQLRLADTKKEVANALLGLLD

SEQ ID NO: 55775 - protein, 216 aa, Oryza sativa; identical to SEQ ID NO: 35141

SEQ ID NO: 55776 - protein, 608 aa, Oryza sativa
MDPDQVEIPFKVLQERVPGKKKYSLRVIKPSSSKKICRSVNSYPLVCLKREMADNDHVHCIMLTLNHRNILSMKALSRDKVESNGPSSLAAFVEPYTGLLSSLCFKHDCWGDRINHIPSPLLQSLLRQVIEGLDFLRKNKLYHGNLNWDSILYLQPSTVKLANFRKQETMSLEEAQWADWLCLIKMLEEILERAAEISSKLAQCDRYFCGHVESLTALLKTLDKTALPAIKEIVLGHPLFWDLMTRVNFFAKDISLRLNDDTFMSRVRASKIRKLPWNEGTTQDFKGLLFEMETYRKDEGIPAYDFRSLKDYVRCVCGAYAHWNKIKLNVDDIVRQNHPTICSDIWHLLGSSDMSHADSKKPVEEIKLISDVVRDSPHKIFIAGIPRVISSKMLRDIVSSFGQLAAYRFLFNEDLGGACAFLEYIDHSITSKACAGLNGMKLGGCVITAVGVLTDHPGQAGNEACPFHGIPANPKPLLAVPTQVLQLKNVFDQEEYSLLSKYEVDAVLEDVRVKCARYGAVKSINVVEYPAGSDNTKAPAVDARDNALASNNTALEAGCILVEFLCKEASFMAAHSLHGRPFGSRIVSAGYAPYDLLSLPEVFPVLRF

SEQ ID NO: 55777 - protein, 319 aa, Oryza sativa
MAPASVKVFGSPTSAEVARVLTCLFEKDVEFQLVRVDAYRGTQRMPQYLKLQPLGEALTFEDDNLTLSESRGILRHIAHKYARQGNPDLIGTGALERASIEQWLQTEAQSFDVPSAEMVYSLAFLPPNMPKQNDNGNGNGNGYGNSNGREVQVANASSKRVVAGATDGKTAASGANGNKQQQKEEEMRKVFEKSKKDLEKLLDIYEQRLEEAAYLAGDKFTIADLSHLPNADRLASDPRSRRMFEARKNVSRWWNNISSRESWEYVKSLQRPPSAAHAGNAQQQQQQQSPSAGNNYQHQQGQGQGQQHYRNEQVENYNN

SEQ ID NO: 55778 - protein, 456 aa, Oryza sativa
MSRAHGSPRSFFPVGNPFRVMFPGGAHLSRKLQELLASYEDALALSLRKLKPEAASDVLTLSWMRLAVDCLSELHTNIANLITDLELPVSDWDDKWVDIYLNSSVKLLDICIALSSELSRLDQGQLLLQYALHVLGSESGVPSQEQLKRAEPSLREWMELVGVRCARLVSCSATLQELAGNLSLMKVKNSAKGKVLMRALYGIESVTVFVCSIFVAVLSGSPKPLVELHVPEKFGWSQAFNDLHTAVSEELTRQLSGGSVAAVKELEEVEACARRLHVLASTSQLEEEAANLANAVSHTEEEVMSDSIAQEGDHHCGLKLADDTTREGGIVISESIAEGGTQEAEMKKDISYEKEVAMVERISYKEHQDSNVKQANGSSDESALVVPERTSVQESKEELLNCISSMSKSAEGLRHGLDSLSKRVGDFFQIVLTGRDALLCNLRISDAASKVAEVSS

SEQ ID NO: 55779 - protein, 319 aa, Oryza sativa
MASGNSGEPSTAPQPNRWYELRLGSSCRDPSPTAKFCTLRYEFKPASIDKTQAGSLQKTKDNRVTVEFHNNQPGKPKVTFEGSQEEYKDNDGVLFFDGETFRLERLHRAVKGLRRVRVPGESSAATSATTGMGESHSPPLPKVGKSPAMSKPAVHSVPVEVERIDIGEPENPGLRNNNRSTTYQPVTTNPFSFSPDPNDQEENLDILGDDDNGSPNNMSSGQGASVRGFDINIPNQLDIDDEIADVDVSDEADEGLNAAEALRAQVNAEGQQDEQETSSSSGSSSSSSSSGSGSGSGSSSSDSDGSDGDSASSGGDVDI

SEQ ID NO: 55780 - protein, 60 aa, Oryza sativa
MEQVPLMLVTEKLCHDKANVFGTSWIAGKAYIYCSMNIIKTIRIAVLAVIGHWDSLWHLG

SEQ ID NO: 55781 - protein, 583 aa, Oryza sativa
MSPLHTHLGFFLLLLLFSLHNPSCSAAANDTLAVGQVLAVGEKLVSRNGKFALGFYKPALPEGIASKYGNITSPGWYLAIWFNKIPVCTTVWVANRERPITDLEIKLTQLKFSQNGSSLAIIINRATEYTVWSRQIANRTAQAKTSMNTSAILLDSGNLVIESIPDVYLWQSFDEPTDLALPGAKFGWNKVTRLHRTGISKKNLIDPGLGPYSVQLNERGIILWRRDPYMEYWTWSSVQLTNMLIPLLNSLLEMNAQTKGFLTPNYTNNNEEEYFMYHSSDESSSSFVSIDMSGQLKLSIWSQANQSWQEVYAQPPDPCTPFATCGPFSVCNGNSDLFCDCMESFSQKSPQDWELKDRTAGCFRNTPLDCPSNKSSTDMFHTITRVALPANPEKIEDATTQSKCAESCLSNCSCNAYAYKDSTCFVWHSELLNVKLHDSIESLSEDTLYLRLAAKDMPATTKNKQKPVVVAVTAASIAGFGLLMLMLFFLIWRNKFKCCGVTLHHNQGNSGIIAFRYTDLSHATKNFSEKLGSGGFGSVFKGVLRDSTTIAVKRLDGSHQGEKQFRAETLGWRHLWEGILVGF

SEQ ID NO: 55782 - protein, 840 aa, Oryza sativa
MEADPAPSSTPPPSSPAPAASPSRHPPGEEGGGAERVEVEEYVDPPSPDCCGGADPDHAPPPSPKGEEPVVSAEEEQAAVAGGEGEALRSFLEEFGDQGDDSLVPSPKLKQINTPDRLAALRFLGGKYNSLLERYKQQVAKCAEECAPRYDGLKKKYADECAERRRLYNELIELRGNIRVFCRCRPLSTAEISNGCSSIVQIDPSHETELQFVPSDKDRKAFKFDHVFGPSDNQETVFAESLPVVRSVMDGFNVCIFAYGQTGTGKTFTMEGIPEDRGVNYRALEELFRLSEERSSSVAYTFAVSILEVYNEKIRDLLDESSEQTGRKLDIKQTADGTQEVAGLIEAPIYTIDGVWEKLKVGAKNRSVGATSANELSSRSHSLVKVTVRSEHLVTGQKWRSHIWLVDLAGSERVNKTEVEGDRLKESQFINKSLSALGDVISALASKNAHIPYRNSKLTHLLQSSLGGDCKTLMFVQISPSSADSGETLCSLNFASRVRAIDHGPARKQADPAETFKLKQMTEKIRHEEKENAKLLESLQLTQLKYASRENVIKTLQEKIREAEQTSKTYQQRVRELENELANEKKAARDTARSTKPPLAPMRQRPPLGRIGNHIPPKAPLRLRLSKAPTIQNKENIPVMLNKGSSGADTSKAVAGKARRVSLTPVIRHIPLQPKRRSSLAVLPTQREQLSIFPDKRSVSRLSHIQMPRRSIATFNSIPATPLAAAAHKQVDGTPEARQLRRIEFSSSKFRSPPALARFNSRNNALSPQQKLRLASGSGNASKICFSVQKRVILGSPAPVKSSLLSGTGIFNPALREKMMAAKIGNAQRVFNTNRRKSVL

SEQ ID NO: 55783 - protein, 524 aa, Oryza sativa; identical to SEQ ID NO: 45513

SEQ ID NO: 55784 - protein, 34 aa, Oryza sativa; identical to SEQ ID NO: 38601

SEQ ID NO: 55785 - protein, 393 aa, Oryza sativa; identical to SEQ ID NO: 32775

SEQ ID NO: 55786 - protein, 612 aa, Oryza sativa
MPPSTTGFPRRRSPPVDADLLPRLRLAAGQSSPWRVLLQSLALVVTSGLSASASHSHRGRALSSRLLNSLLPHAPRRLLPALLRLLPGDHLTLLLLVSSKHHSHSLPAASALHALAVSSGHLPSDLRIANSLLSLYLSLGSPASARRLLADIPRPDAVTWNTLLRACLRLGLLPAARRLFDEMPERDVVSYNSMVAGYVAEGDLAGARNLFDGMARRDVVTWNSMISGYSRHGDMENARKMFDAMPERDVVSWNSMLDGYAQAGDVDMARLVFDGMPKRSIVSWNVILALYAKLRDWRECLGLFDVMIAEGNTVPNEKTFVSVLTACANLGDLEKGRWVHDLVQERWDRLVPDVLLLTTLLTMYAKCGVMETAREIFNSMGERSVPSWNSMIIGYGLHGQSEKALELFLEMERDGPRPNETTFICVLSSCAHGGLVLEGWWCFDRMVRFYSIEPKSEHFGCMMDLLGRAGLLEQSENLIENLQGKVSEALWGILMSASQTQNNIKLGEFVGKKLIEMRPTEVGPYILLSNIYAAEGRWDDVEKVRKVMEEKGVEKDAGLSLVGSREGGHFINESGASAPRNDVMLCMLGEMSVHMKQPSEGSNCRKRSPSAP

SEQ ID NO: 55787 - protein, 555 aa, Oryza sativa
MGGYEYATNGYHRGMEDDYEDEYYSEDPYDEEGEGAGQEYAEEDDEPPEGQQEFLQIRERLKEQIRRKAQAASASAAGRSSSSHDRKPQSTFGSFFGPSKPVISQRVIEERKSLKELQNTASMSRDRRPSAKEIPSSSKVQSKTDGHHHKQKIVNEAKRKAEALKDNRDYSFLLSDDADISPSPMEKPVARSSLSQKSDRESTHSAVKSRAPTGQTARLSNGYGLKNTLSSQRHTEGRVDSNRKVAGANRERVVLPDNGRMHSVVRNGSTQATTSKAASQKLPSKAPIANRPPIKSVSDQSLRANHSASKQLLSQNGRPQSSQSQRMQSTSHGQRPHQPVQSQWPLQSLQGRRPQQSPQNTRPQLMSKSQRPQQSLQRQRPQLSSQNERLESSERQRPPSQSYRPQSSQGQRPSSVQGRQYSEQRRIQANDRVKSAERQIRPPSKPMPSRQIPSNGMRDAHAKKKQPMKRRFNDLSEDEEDPLAMIRSMFRYDPSKYAGRDDDDSDMEADFATIEMEEQRSARIAKEEDDEQLRLIEEEERREQERKRRKMARGR

SEQ ID NO: 55788 - protein, 306 aa, Oryza sativa; identical to SEQ ID NO: 51486

SEQ ID NO: 55789 - protein, 104 aa, Oryza sativa
MEETRRQRRRRKRECECQPRDGATATLRSPRRRRSPLRWPPSHRILSPPPSPSSPSWRSPSYPPSPRTPRLMPVLFCFFAKFLFIFRCLILLVMRMNQESTDSL

SEQ ID NO: 55790 - protein, 182 aa, Oryza sativa
MNEYRLPPADTDRYHKTEISLCRVYKPTGIDDGPWPGIHGAVVGALPRRRRGTGTGQQARLLVDVHADAASNSVQAPPPQQRVHVAARHRHGPRRHGGAQGTVAAAPSAAAAAPRCQALRRLPAEFLDGFRCRRRSAAAISARLRGGIVPAVLQGHERCLRLHVLAAQPRQRGIHGKLHRCH

SEQ ID NO: 55791 - protein, 476 aa, Oryza sativa
MTPQLQPKQMHWARADSSDFGGQIPAPRSGHTAVSIGKSKVVVFGGFADKRFLSDIAVYDVENRIWYTPECNGSGSDGQAGPSPRAFHVAIVIDCNMFIFGGRSGGKRLGDFWMLDTDIWQWSELTGFGDLPSPREFAAASAIGNRKIVMYGGWDGKKWLSDVYIMDTMSLEWTELSVTGSVPPPRCGHSATMIEKRLLVFGGRGGAGPIMGDLWALKGVTEEDNETPGWTQLKLPGQSPSPRCGHSVTSGGPYLLLFGGHGTGGWLSRYDVYYNECIILDRVSVQWKLLATSNEPPPPRAYHSMTCIGSRFLLFGGFDGKNTFGDLWWLVPEGDPIAKRDLVPNVDSDSKPSNVTGGAQHSASQESQAGESPMIDLAKRLGISLSLEASASFVDEINDKELIELSSMLFGESPPTGDQHACIQALRDHWTSIPANSIQLQELGPLLRDYQRLILRRYLYGSHSCVFPLLSLFTLS

SEQ ID NO: 55792 - protein, 64 aa, Oryza sativa
MAMRALHDGWCRVGVMGCHHGLRLLMLLDFVFNEGGKNVLFLTLCCAFKEQRFQKLFRYQRTSL

SEQ ID NO: 55793 - protein, 374 aa, Oryza sativa
MGNCAGVQGNAEINPSFSAPNSSGTGSKNSSKNGADSSTFGTKASASSSVPPTPRSETEILQSSNLRKFTFGELKGSTRNFRPDSLLGEGGFGSVFKGWIDERTLTPVKPGTGMIVAVKKLKLDSFQGHREWLAEVNYLGQLSHPNLVKLIGYCFEDEQRLLVYEFMPRGSLEHHLFRRGSHFQPLPWNLRMKVALEAARGLAFLHSDQAKVIYRDFKTSNILLDSDYNAKLSDFGLAKDGPSGDKSHVSTRVMGTQGYAAPEYLATGHLTAKSDVYSYGVVLLELLSGQRALDKNRPPGQHNLVEWARPYITNKRRVIHVLDSRLGSQYSLPAAQKIAGLAVQCLSMDARCRPGMDQVVTALEQLQGAKKAAK

SEQ ID NO: 55794 - protein, 198 aa, Oryza sativa
MIDMVLLKFFSHREIPSPNIALHSAHCARNLQKCEHCGYMVPKKLMDEHYDENHAPMICSLCQKTVQRELWDLHKGLQCPQRMLACQYCDFELPAADIYEHQDVCGNRTEYCQPCRKYVRLREQIGHDIQFHSQPIVASESSSDRSTLEEEESYPAEEQPVRPKHTHGLQRKQFLVTIVIAGISILVGSVLLKKGWLS

SEQ ID NO: 55795 - protein, 316 aa, Oryza sativa
MVAPSPDAGKPLVILLRPLYPEFAAALDGRFRFVLAADADEGNAAEARAVLVPALTPVSADLVARLPKLEIVVATSTGVDHIDLDACRRRGISVTNAGEVFAPDVADYAVGLVVAVLRRVAAAEAYLRRGRWAADGDYPLATKVSGKRVGIVGLGSIGGLVARRLAAFGCVIAYNSRSPKASAPYKFYPSVRELAAESDVLVLSCALTEETRRMVGGEVMEALGKGGVLVNVGRGGLVDEAELVRCLREGVLGGAGLDVYENEPEVPPELWGMDNVVLSDHRAVITPESIQGVVDVVKANLDAFFSGKPLVSQVQL

SEQ ID NO: 55796 - protein, 997 aa, Oryza sativa
MDDSLYDEFGNYIGPELADSDADDSDADASPSPSPSRSPSPSARSPSGSPSRPAALMDVDGGDDDDDADPSQSAVVLAEDKKYYPTAEEVYGPGVEALVMDEDEQPLEQPIVAPPRVVRFEVGTRAEATSTYATTDFLLGLAANPALVRNVALVGHLQHGKTVFMDMLVEQTHEVDTFDSEGERHVRFTDTRVDEQERRVSIKAVPMSLVLEGGNGKSYLCNIMDTPGHVNFSDEMTAALRIADGAVLVVDAAEGVMVNTERAIRHATQERLPIVVVINKVDRLITELKLPPNDAYFKLRHTLEAINDLISSCSTTVGGTQLVDPAAGNVCFASGSAGWSFTLQSFAHLYLKIHGIQFDHEKFASRLWGDLYYHPDTRTFKKKPPKEGANRSFVEFVLEPLYKIYSQVVGESKGKVEATLSELGVTLSNAAYKLNVRPLLRLACRSIFGTSTGFTDMLVKHIPSVKDAAPRKIEHIYTGPQDSTIVDAMKKCDPHAPLMVNVTKLYPKSDCSVFDAFGRVYSGTIQTGQTVRVLGEGYSPDDEEDMTVKEVTKLWVYQARYRVPISKAPAGSWVLIEGVDASIMKTATICPMKMDEDVYIFRPLRFNTLPVVKIAAEPLNPSELPKMVEGLRKISKSYPLAVTKVEESGEHTILGTGELYLDSIMKDLRELYSEVEVKVADPVVTFCETVVDTSSMKCFAETPNKRNKITMVAEPLEKGLAEDIENGLVSLDSRQKEITDFFRQRYQWDVLAARSIWAFGPEKQGPNILLDDTLSVEVDKNLLNAVKDSIVQGFQWGAREGPLCDEPIRNVKFKILNANIAPEPLHRGGGQIIPTARRVVYSAFLMANPRLMEPVYYIEIQTPIDCVSAIYTVLSRRRGHVTADVPKPGTPIYVVKAFLPVIESFGFETDLRYHTQGQAFCLSVFDHWAIVPGDPLDKNIVLRPLEPAPIQHLAREFMVKTRRRKGMSEDVSINKFFDEAMMNELAQQAADLHLQMM

SEQ ID NO: 55797 - protein, 236 aa, Oryza sativa
MRRLPLRLLRSAASSPRRRPAPSPPPSPNPAAPPALLSRWGWGWAPPRRGYSRFATGFTPLQPKPLASILDVERASGLSPDHLVAAWDDYHLGRGHIGASMSAKLYHLMEQRSATCRHFVIPLWKGTGYTTMFMQVQMPHMIFTGLEDYKARGTQASPYYTITHYTEFAETKDTVLIRGDVVFTSKLTDSEAKCLLESAHSFYLNDVRYRLVERFNKEPHEFEFKDVLQVLEMPTM

SEQ ID NO: 55798 - protein, 1011 aa, Oryza sativa
MAAYKLGVEVASAHDLMPKDGQGSASACVELTFDGQRFRTAIKDKDLNPVWNERFYFNVSDPSNLPELALEAYVYNINRSIDGSRSFLGKVRIAGTSFVPFPDAVVMHYPLEKRGMFSRVKGELGLKVYITNDPSIKASNPLPAMDPVSNNPPPTPAEQIATDITGTNLSTTHEHRAEVKTLHTIAKEVQHQHHGHGHLPASFPDQPSKYAVDQMKPEPQQPKIVRMYSAASQQPMDYALKETSPFLGGGQVVGGRVIRAEKHASTYDLVERMQYLFVRVVKARDLPDMDVTGSLDPYVEVRVGNYRGITRHFEKQKNPEWNAVFAFSRDRMQATILEVVVKDKDLLKDDFVGLVRFDLNDVPMRVPPDSPLAPEWYRLVHKTGDKSRGELMLAVWIGTQADEAFPDAWHSDAATLEDPSAVTHMKSKVYHAPRLWYLRVNIIEAQDIAITDKTRYPDVFVRAQVGHQHGRTKPVQARNFNPFWNEDLMFVAAEPFEDHLILSLEDRVAPNKDEVLGRVIIPLTMIDRRADDRIVHGKWFNLEKPVLIDVDQLKKEKFSTRLHLRLCLDGGYHVLDESTNYSSDLRPTAKQLWKPSIGLLELGILGAQGIVPMKTRDGKGSSDTYCVAKYGSKWVRTRTIVNNPGPKFNEQYTWEVYDPATVLTVGVFDNGQLGEKGGEKTSSSKDAKIGKVRIRLSTLETGRVYTHSYPLLVLHPSGVKKMGELHLAIRFSSTSLVNMMYLYSRPLLPKMHYVRPIPVLQVDMLRHQAVQIVSARLSRMEPPLRKEVVEYMSDVDSHLWSMRRSKANFFRLMSVFSGLFAVSKWFNGVCSWRNPITTVLVHILFIMLVCFPELILPTVFLYMFLIGVWNYRYRPCYPPHMNTKISHAEAVHPDELDEEFDTFPTSRSPDVIRMRYDRLRSVAGRIQTVVGDIATQGERVQALLSWRDPRATAIFVLFCLIAAIVLYVTPLQVLAALAGFYVMRHPRFRYRLPSTPVNFFRRLPARTDSML

SEQ ID NO: 55799 - protein, 509 aa, Oryza sativa
MVKKKRTGSGSTGESSGEAPGAPGHGSSQRAERGPQQHGGGRGWVPQHGGRGGGQYQGRGGHYQGRGGQGSHHPGGGPPEYQGRGGPGSHHPGGGPPDYQGRGGSGSHHPGGGPPEYQPRDYQGRGGPRPRGGMPQPYYGGPRGSGGRSVPSGSSRTVPELHQAPHVQYQAPMVSPTPSGAGSSSQPAAEVSSGQVQQQFQQLATRDQSSTSQAIQIAPPSSKSVRFPLRPGKGTYGDRCIVKANHFFAELPDKDLHQYDVSITPEVTSRGVNRAVMFELVTLYRYSHLGGRLPAYDGRKSLYTAGPLPFASRTFEITLQDEEDSLGGGQGTQRRERLFRVVIKFAARADLHHLAMFLAGRQADAPQEALQVLDIVLRELPTTRYSPVGRSFYSPNLGRRQQLGEGLESWRGFYQSIRPTQMGLSLNIDMSSTAFIEPLPVIDFVAQLLNRDISVRPLSDSDRVKIKKALRGVKVEVTHRGNMRRKYRISGLTSQATRSYHSLSMIVVL

SEQ ID NO: 55800 - protein, 104 aa, Oryza sativa
MSRRPVHRRRVRLPITHRVVLRLADILSPRCHQSRDGHRRCHAAVVVRSSSTAPTPVVSSCPPTPAHPPSLDIPASFIKKITFFLLLLHLLCGEKTLSEAKYCC

SEQ ID NO: 55801 - protein, 542 aa, Oryza sativa
MSAAAGRNALLDELRALMAAHSPPLHALVVPSDDAHQSEYVAERDKRLQFISGFTGIARSAGLALITMKEALLWTDGRYFLQAEKQLSDHWELMCMGEDPPVEVWIADNLSDEAVIGINPWCISVDTAQRYEHAFSKKHQTLFQLSSDLVDEVWKDRPLANTQPVVHPVEFAGCSVTGKLKELRKKLLHEKARGIIIAALDEVAWLYNIRGNDVHYSPVVHSYSIVTLHSAFFYVDNRKVSVESYMSENGIDIRDYNMVQSDVSLLASGQLKGSAVNGSSHEGNGMNDNSKILIDNSCCLALYSKLDEDQVLILQSPVALSKAVKNPVELDGLRKAHIRDGVAVVQYLAWLDNQMQENYGASGYFSGAKGSQKKEHVEVKLTEVSVSDKLEGFRAAKEYFKGPSFPMISAVGPNATILHYSPEASSCAELDTDKIYLFDTGAQYLDGTTDITRTVHFGKPSEHEKSCYTAVLKGHIALDTAVFPNGTTGHALDILARTPLWKSGLDYRHGTGHGVGSYLTVHEGPHQISFRPSARMYHYKHR

SEQ ID NO: 55802 - protein, 731 aa, Oryza sativa
MDIYNVEAAEILANEAQLLPIGEAAPIYEKLLSTFPTAAKYWKQYVEAYMSAKDDEATKQIFSRCLLSCLQINLWRCYINFIRRVNDKRGSDGLEETKKAFDFMLNYVGNDVASGPVWMDYIAFLKSMPVVTPQEESHRMTTVRKVYQKAILVPTNHVEQLWKDYENFENSVSRTLAKGLLSEYQPKFNSAKAVYRERKKYIDDIDWNMLAVPPTGSYKEEQQCMAWKRLLAFEKGNPQRIDATTANRRVTFTFEQCLMYLYHHPDIWYDYAMWHAKNGSVDSAIKIFQRAVKALPDSGVLKYAFAELEESRGAIQPAKAIYESLIAENAGMTSLAHIQFIRFLRRTEGIEAARKYFLDARKLPGCTYHVYVAYATMAFCLDKDAKVAQSVFEAGLKRFMHEPGYILEYADFLCRLNDDRNVRALFERALSLLPPEESIEVWKRFAQFEQTYGDLSSMLKVEQRRKEALSRTSEDALSALENTLYDVVSRYSYMDLWPCSTKELDYLSRHEWLAKNIANRGDKSVVLTGGATLGDIRVGSNKKSFPQSSKVVRPEISRMVIYDPRQMKGPDFSTTASGYTKEIDEILKRLSPQMMSFITNLPAIEGPSPDMDIVLSVLMQSTLPVGDKPGSQVPGPATSDLSGPGKSGLNQNGSIHRPPRDGQPTKRKNSERGRAQEEDDTSTTVQSRAMPRDIFRLRQIQRNRGLGPSQSGSAALSSGSVFSGDQSASSG

SEQ ID NO: 55803 - protein, 293 aa, Oryza sativa; identical to SEQ ID NO: 29447

SEQ ID NO: 55804 - protein, 896 aa, Oryza sativa
MGTRMPTLRRLSATLSSVLLEWILMLLLFIDAVYCFLVTRFARLCRLPAPCPFCSRLDHVLGNEKPCFYRELICKTHKSEISSLAFCRLHQKLAGAQSMCERCSDSLVENNDDRTDEPTMAATLPDSNQGLYSHDTRICSCCAQHYTQQRPTMFSRMITELEPAEAVCSPKICTDYSILHQVDKSLDKDICHQSDHSIHERYSVLQMTSGSEDEAPCADDGKISHHHKTNCMEEDLNEDATAEKFAASSTELVRPLEMNVPMETDVGDSYDISLPYVLVDDHPDSIIGEGQMEAEDASLEKQTCQHDPLAVKEESGLTDVNVSQVPVASSVESPQNLGYNEACHGASESTIDPCSSQSTTLEQNIAVSEHNSTIDDLEGHRSEITVTSSREFHQKSALVDDDPVNFRDDHVSQVNSSSEAVDEAEDYAKEAEQTCDMVTHEAALKDPSNTNSKDPTAKGFVEEAPISPQAIRPNSEVFQGLNVIEEHPQTSATIGERRPSLSTQISMNEAYKLAIGAKSSLPSPTLTDVILGKDSSSSVNEELRLLLSQLSASRGLEAPWVDPGPSPRAYGRGDDLIVQNIANRISIERNASGLESLEGSTVSEMEGESATERLRRQIDLDRKSIHLLCKELEEERNASAIAASQALAMITRLQDDKAAMQMEALHYQRMMEEQAEYDSDALAKANELLAQREQQIEELEAELENYRMQFAGGPTEKQSNQVSFNEENIAETLLDETGLEAPAITTPSGINSLVSFEEERAYIVDCLTKLEQKLQSYSNNSTNIHLSNSDVIEDYLSNKMHVVDDGSLQCQESSREAQEPVFLAKEAHSSTVSRKTDLSTLQEEISNLNKRLKTLEGDRNFIEHSINSLRNGKEGVMFIQEIASNLRELRAIAGSK

SEQ ID NO: 55805 - protein, 352 aa, Oryza sativa
MAAAASPKRLRVYSSVSGDGRSANGAGSGKRVGTHNGSFHCDEALGCYLIRLTSQFAGADVVRTRDPQILDTLDAVLDVGGVYDPSRHRYDHHQKGFNEVFGHGFNTKLSSAGLVYKHFGKEIIAKELEVSEDHEDVHRLYLAIYKSFVEALDAVDNGINQYDTDQPPKYVNNTHLSSRVGRLNPDWTDPDQSPEKENAAFQQAMMLAGSEFMESVRFHVKSWLPARSIVLECLLSRGKVDPSEEIMVLDRFCPWKLHLFELEEELKIDPLTKYVLYQDERSKSWRVQAVGVAPDRFESRKPLPEKWRGLRDDELSNDIGIPGCVFVHMSGFIGGNKTYEGALEMARAAIKC

SEQ ID NO: 55806 - protein, 479 aa, Oryza sativa
MLPYGLAWANGGPGHRRSASVNELCLGGDGFGWKPCLYYARGFCKNGSTCRFVHGGLSDDAAMDATTAEQQQCQDFLLRSKSQRLGPAAFPFTPTGSLPASPSATSKCLSLLLQQQQQHNDNQRAAAAALMLAGGDEAHKFMGRPRLDRVDFASMMNPGSRQIYLTFPADSTFREEDVSNYFSIYGPVHDVRIPYQQKRMFGFVTFVYPETVKLILAKGNPHFICDARVLVKPYKEKGKVPDKYRKQQQGDFCCMSPTGLDARDPFDFHQLGARMLQHSNSANELMLRRKLEEQQQAAELQQAIDLHSRRLIGLQLLDLKSSAAVHAAETTTMSLPTPITNAFTSGQPGATTIVESPPSSTGQLMASCGSPSEGKVVNGGNKADSAGEVTRNADSDQSGEHNLPDSPFASSTKSTAFFTATAATAIGSEGDFTTGSSCNIGGSAVGSANPLRPPTLDIPSPRTCFFPMPRLSEHGAIGM

SEQ ID NO: 55807 - protein, 618 aa, Oryza sativa
MTGGRRRRRRRRRGIPSVAVAVTVIEASLRRLLLLLHRPPPPPPPPRPPLPPFQTLARGILPRIAARPVPRRFSTASCSSTLFRVGECGAPGATAIPEAERGEEEEREGEDGGEADAAVEVAAGRHDTDAYAAVELALDSVVKVFTVSSSPNYFLPWQNKAQRESMGSGFVIPGRRIITNAHVIADHTFVLVRKHGSPTKYKAEVQAVGHECDLALLKVDSEEFWDGMNSLELGDIPFLQEAVAVVGYPQGGDNISVTKGVVSRVEPTQYAHGATQLMAIQIDAAINPGNSGGPAIMGDKVAGVAFQNLSGAENIGYIIPVPVIKRFISGVEESGKYSGFCTLGISCQATENIQLRECFGMKPDLTGVLVSRINPLSDAHRVLKKDDILLEFDGVPIANDGTVPFRNRERITFDHLVSMKKPGEMAVLKVLRDGKEHELNVTVRPLQPLVPVHQFDKLPSYYIFAGFVFIPLTQPYLHEFGEDWYNNSPRRLCERALRELPKKAAEQLVILSQVLMDDINVGYERLAELQVKKVNGVEVENLKHLCSLVESCTEENLRFDLDDERVIVLKYQNAKLATSRILKRHRIPSAISADLVDEQATDDGEEATNGEIEASCTS

SEQ ID NO: 55808 - protein, 188 aa, Oryza sativa
MRALDEKETKMVFEKLFKFTGPNLKHLLERPAVEGPDPQAGRYCLRLHKNRVYYASEALVRRATAVARPRLAGVGTPIGKFTHGGAFHLTVHALDLLAAHARRRVWLKPDTERSFLFGNSVPKSSLARIAENTKANDGVVVMSMADVPLGFGIAARSAQDCRKADTNAVVVLHQSDAGEYLRREEELM

SEQ ID NO: 55809 - protein, 467 aa, Oryza sativa
MEQPNDVGILAMDIYFPPACVHQEALEAHDGASKGKYTIGLGQDCMAYCSEVEDVISMSLTVVASLLKKYNIDPKQIGRLEVGSETVIDKSKSIKTWLMHIFEESGNTDIEGVDSSNACYGGTAALLNCVNWVESKSWDGRYGLVVCTDSAVYAEGPARPTGGAAAIAMLIGPNAPISFESKYRASHMAHVYDFYKPDLASEYPVVDGKLSQTCYLMALDSCYRQYCTKYEKIVGEQFSISDAEYCVFHSPYNKLVQKSFARLYFNDFMRNCSTVDNDAKEKLQPFANLTSEESYQSRDLEKASQQVAKHLYDIKVQPSTLLPKQIGNMYTASLYAALASVIYNKHDSLDGQRILMFSYGSGLTSTMFSLRLHDGQHPFSLMNIASVLDVTTKLESRHVTSPEKFIETLKLMEHRYGAKDFETSKDTSLLPPGTFYLTKVDSMYRRFYDKKAAEGKIKGCNGIANGH

SEQ ID NO: 55810 - protein, 1028 aa, Oryza sativa
MEAKPEPVSGVIPVVVDDTSSEMIAPVSAESAVEESTEKEQTVDDTSSEMIAHVSAESAVEESTEKEQTVESEAIESVEIVGVEKPTEDESNVDGGASSVVSRELAPEETKENNVGQEDEGVAEVIDREEDADDDEEIVLAAADDEDDGTNEADDDEDGVSSDRGPARVAIIESSEAAKQIMKELGEGSASVSPVSGLSSSREYTNSMDGQIVLDDSEEDGDDDDNEDDDEKGFDSAALAALLKAATGASADGNVTVSSQDGSRIFSMDRPAGLGSSAPSLRPTVPRPVARSNLFSPSELAVTAEPTEEMTEEEKKLHDKVELIRVKFLRLVYRLGATPEETVAAQVLYRLSLAEGIRHGRQTNRAFSLDNARKKAMLLEAEGKEELNFSCNILVLGKIGVGKSATINSIFGEEKSKTDAFSSATNSVREIVGNVDGVQIRIIDTPGLRPNVMDQGSNRKILASVKKYTKRCPPDIVLYVDRLDSLSRDLNDLPLLKTITSVLGSSIWFNAIVALTHAASAPPEGLNGAPMTYEVLMAQRSHIIQQSIRQAAGDMRLMNPVALVENHPSCRRNREGQKVLPDGQSWRHQMLLLCYSSKILSEANSLLKLQDPNPGKLFGFRFRSPPLPFLLSSLLQSRAHPKLSPDQGGNEGDSDIDLDDYSDIEQDEDEEEYDQLPPFKPLTKSQLARLTKEQKNAYFDEYDYRVKLLQKKQWKDEIRRLKEMKKRGKTDMDAYGYANIAGENDLDPPPENVSVPLPDMVLPPSFDCDNPTYRYRFLEPTSTVLARPVLDAHGWDHDCGYDGVSVGETLALLNKFPANMAVQVTKDKKEFSIHLDSSISAKLGEDASSLAGFDIQTVGRQLAYILRGETKFKNIKKNKTTGGFSVTFLGDIVATGLKVEDQLSLGKRLALVASTGAMRAQGDTAYGANLEARLKDKDYPIGQSLSTLGLSLMKWRRDLALGANLQSQFSIGRGSKMVVRLGLNNKLSGQITVRTSTSEQVQIALLGLIPVAASIYRSFRPSEPSFAY

SEQ ID NO: 55811 - protein, 445 aa, Oryza sativa
MPPSSRMAPPPLAGVVVVAAALLLLLPEAAEPRTLLSLDDFGAVGDGVANDTQALVDAWSAACATGDHTFLHVPAAKSYLVWPVTLAGPCREEIKLFISGNIVAPESPDEWPEGGGGGGEWLHFVGVSDLTLSGGGVIDGRGHRWWARSCKAKHNATENCTTQAAPKALHFEDCQGISVMGITLQNSQESHLTFTRCSHVKANYLRITSPEDSPDTTGVHVVSSRNVHIMDDSISTGHDCVSIVGNSTDVRLRAISCGPGHGISIGGLGENRSYHRVEKIKMDTLFISNTENGVRVKTFQGGCGTARKMKFGDILMKNVKNPIVIDQQNSSSNEIPCGSKNGSAVTVGEISYTDITGTSASERAVTFACSEAAPCSKLSLENVNITMAGGQNASAYCHHAFGKSVGVVVPDSCLGKEDYLRRQVPASAAAAGGGTQEKGGEDDDR

SEQ ID NO: 55812 - protein, 614 aa, Oryza sativa
MGLHAILLLLLLRISASAAASRPPLDTLGIPPQDEAYFRGGVIRCRDGSGRFARDKLNDDFCDCPDGTDEPGTSACPEGKFYCQNAGHSPITIFSSRVNDGICDCCDGSDEYDSNVTCKNTCWEAGKAARDKLKKKVATYKSGVVIRNQEIQKAKVAFAKDEAELAKLKGEEKILQGLVDKLTEQKKLIEKAEEEERLRKEKEEKRMKEEAEKQAADEKKASDASQEVDSQENHETVQEDESKVAEHHDGHATSHDNHTPESESSVEQHDPESQDDISIKAAPADESPPEETSAAPTKEQESTPADSEGLSREELGRLVASRWTGEKVDEVSKDDKNEHEAEHDMPEHSEETHEDESDVPESAEDSYAGYHSEVEDDRHKYDDEDFSHESDDEYVDDHDEHVASYKSDDDQKGDDHSDFTASGQASWLDKIQQTVQNVLRTFNFFKTPVDLSEASRVRKEYDDASSKLSKIQSRISTLTDKLKHDFGKEKEFYYFYDQCFESKEGKYVYKVCPFKKASQVEGHSTTSLGRWDKFEESYRVMQFSNGDRCWNGPDRSLKVRLRCGLNNELNGVDEPSRCEYVAVLSTPALCDEQKLKELEQKLKASSNQRDHDEL

SEQ ID NO: 55813 - protein, 227 aa, Oryza sativa
MGRGKIAIKRIDNTMNRQVTFSKRRGGLMKKARELAILCDADVGLIVFSCTGRLYDFSSSSMKSIIERYQEAGEEHCRLLNPMSEAKFWQREVTTLRQQVQNLHHNNRQLLGEEISNFTVRDLQLLQNQVEMSLHSIRNKKDQLLAEEILKLNEKGSLVQKENSELRKKFNIAHQRNIELHKKLNSGESTSSEQVTRSSKDPGESSTPRDSRVCIDLELSQKEVEDE

SEQ ID NO: 55814 - protein, 319 aa, Oryza sativa
MAPASVAVSLSFRVVPPRPCRRRARWPRPIRASSDGSGVANGDRKVGALERRVGDLRAVVASVPPAVAAIKKNIGLNFIAGFCLGITLLAAVARQVIIRIHERDNKGSVADLIRRGQLKSGQRGIAKPRVYDDPFNNPLVKIDEDTSTAQVFGKEYRLAPIRLTKEQQAMHQKRRSRTYQWKRPTVFLKEGDSLPPDVDPDTVRWIPVNHPFAAASTEVDEETAKQNVYQKDGVPSRVKAEHEALQTRLEASNNVNKFSSSQRNMQLSDRQLRLSSNESSGSRQNSLSGTVKNQNGQPTLESEKRSPDNNSQSKSLEEQ

SEQ ID NO: 55815 - protein, 311 aa, Oryza sativa
MLRRVAPSLRRAILTSSAHGRAGAQLTEPGLSPRHALLPQWRLCSSAASTNSPPPPPPPPSSPPQGTPRPAGGSTVSSLNPAEVAKFAAIAETWWDSEGPFKPLHLMNPTRLSFIRSTLCRHFRRDPNSSKPLEGLKVIDVGCGGGILSEPLARMGATVTGIDAVDKNIKIARVHAASDPSTASIEYFCTTAEDLVKENKQFDAVISLEVIEHVANPSGFCESLSALTVPNGATVISTINRSMRAYATAIVAAEYILNWLPKGTHQWSKLVTPEERSWSLYWKELQSLYKKWPGLCIIRCVESGLCQMILL

SEQ ID NO: 55816 - protein, 291 aa, Oryza sativa
MAGTPPDGGGDRPWESYHTAYTNAKAGMEGVDKEKVQKVIYEMSKGSKYFENEQRKEAITKQKIDHLRAQCAKLTDNDISHFQKVAEHKILELEASRDLSKIWLHTDMDAFYATVEILENPSLKGKPLAVGSMSMIATASYEARKFGVRAAMPGFIGCKLCPELVFVRPNFERYTYYSELTRKVFQRYDPNFVATSLDEAYLNITKVCFDRGITGEEVATELRGAIHQETGLTCSAGVAPNRMIAKVCSDINKPNGQFILPNDQEAVTTFVSTLPIRKVLLFLVVKNGPCF

SEQ ID NO: 55817 - protein, 269 aa, Oryza sativa
MSAAVCGKRASSFFEDLPHSPSSPPSKRACFRGGSSPSRPLADPALVAQIRPRFPSVGLEVIENALEECENDFDSAIKFLFNLHVGPTECNVDPIYQSPSGMSTELQVADEGILAGNEAAVPIGNAPCADNFPSSSTQWVEILVNEMTNASNMDDAKARASRVLEVFEKSMTAHVGAMGSFQKESSVYKEQFEAITRENTILKKAVAIQHERQKEHDGRNQEIQQLKQLVAQYQEQIRSLEVNNYALSMHLRQAQQANSIPGHFHRDIF

SEQ ID NO: 55818 - protein, 76 aa, Oryza sativa
MPASSIQKYIMQKLSLPSETEVEISCCGQPVNPIQPLRNLIERWLRFGPARTLQTVVGSSGGDYVMVISYGRPKAA

SEQ ID NO: 55819 - protein, 899 aa, Oryza sativa
METLNPDAGDRAAAGAAQGVGVAAGGEGEARRAEKGEVVGGGLDPELSVARIYLGRIGAGLQNLGNTCYLNSVLQCLTYTEPFAAYLQSGKHKSSCRTAGFCALCALQNHVKTALQSTGKIVTPSQIVKNLRCISRSFRNSRQEDAHELMVNLLESMHKCCLPSGVPSESPSAYEKSLVHKIFGGRLRSQVKCTQCSHCSNKFDPFLDLSLDIGKATSLVRALQNFTAEELLDGGEKQYQCQRCRKKVVAKKKFTIDKAPYVLTIHLKRFSPFNPREKIDKKVDFQPMLDLKPFISDSKGADFKYSLYGVLVHAGWNTQSGHYYCFVRTSSGMWHNLDDNQVRQVREADVLRQKAYMLFYVRDRVGNPTPRKDNITANMPARRTIPEKISGLSDMIQSGVIEAKLNGSSSPYGDKRLHGISNGNSIKTSREHYLKKDGKTEAPKASENNGLASTQKASAPQIDGATLSAQSKQITSTGHREVSSSDRSASLTHVIVNQAVAMVPSQELQPKVDGLTDTSSLGNGNAILSERNKQTSQHQNPFSMPASHGKDTGAGLAAQTFPTKDAIVSNGVVPSSRDPISSEKVCGLQKSIKQDDKTVKELPISENNIVSGLERVNARKQTSSEVSMKVAAADSCNSNTPKRVDLKSKKLVRYPVMNMWLGPRQVMLGSLKVQKKKKCNRTRRRSVVCEDMANATCSGNNTSEQQASTSTTTSSETVQCTPRGRKRAYDSDSPKNNNQKQNKQDVIGADTGSGELNMDKRNVISETAASAELPKLGPGSSANQEHSRNNVHAKLGVPRHFTVLTRDLAEVTVPCWDDVAVSNAEARESKHSESKSIGYVLDEWDEEYDRGKTKKIRNSKEDYGGPNPFQEEANYISQRNMKQRTYQPKSWKKHAHVRR

SEQ ID NO: 55820 - protein, 426 aa, Oryza sativa
MAAPLFLLLLLLLVSSASAGYEEEALLRRAEEERDWMVGVRRRIHAHPELAFREHHTSALVRDELERLGLTARAVAGTGVVADVGSGLPPVVALRADMDALPVQELVEWEHKSKVDGVMHACGHDVHTAMLLGAAKLLSERKEQIKGTVRLLFQPAEEGGAGASYMIKDGVLDGVEAIFGMHVDYRMPTGVIAAHAGPTQAAVCFYEAKIEGKTGKAETPHLNVDPIVAASFVILSLQQLISREDDPLHSQVLSVTYVKGGNTIDATPPVIEFGGTLRSLTTEGLYRLQKRVKEVVEGQAAVHRCKGVVQIKRDDYPMYPAVFNDEKLHHHVETVGRRLLGPDKVKPGEKIMAGEDFAFYQQLVPGVMFGIGIRNGEVGSVHTVHNPKFFVDEDVIPIGAALHTALAEMYLTERSTEGEDGSQHSH

SEQ ID NO: 55821 - protein, 255 aa, Oryza sativa
MSGRKKTREPKEENVTLGPTVREGEYVFGVAHIFASFNDTFIHVTDLSGRETLVRITGGMKVKADRDESSPYAAMLASQDVAQRCKELGITALHIKLRATGGNKTKTPGPGAQSALRALARSGMKIGRPRARAPVPRRRGVRRRHPPRRRDRQGRPPRPRHGRRHRRDRRHRRQRLHPPPRHAGRDRQGRGRPAPQDRRRRPHWRRRDDPRQCQDRRRGQDRGRVAGAHRRAAEDHGGGESGEAARREEGRRHAG

SEQ ID NO: 55822 - protein, 934 aa, Oryza sativa
MGSDGASRKRSISDLFLNLPSLQGLKPSSPRKRRRISESMESWSPLQAYSSDSQSRTSLTYGNILAERNNCVPATTYASVLLHVIRHCSLSIKHAQITAQMDSLAIPYVEEVGLRSPSSNLWLRLPFARDDSWKHICLRLGKAGSMSWDVRINDPHFRELWELSTGSTTTSWGVGVRVANTSEMDSHISFDAEGVILTYSNVEPDSVQKLVSDLRKLANARSFARGMRRLIGVKLNDKLDDDQTSTDIKSQPVNKGNSDAADRLSEQMRKTFRIEAVGLMSLWFSYGTMPMVHFVVEWESAKGGCTMHVSPDQLWPHTKFLEDFVNGGEVASFLDCIRLTAGPLLALGGAIRPARMPVTVSSGYNSMPKQMNNIPTQGPLANGSSSTTMHHAPSPANVAATHLGSHNLHTAAMLSAAGRGGPGLVPSSLLPFDVSVVLRGPYWIRIIYRKKFSVDMRCFAGDQVWLQPATPPKGGPLVGGSLPCPQFRPFIMEHVAQGLNALEPSFMNATQAGAHLNSSAGTLQPAPNANRVNATQGIGMSRPASGVANHVAANLSRAGNAMLASSGLASGIGGASVRLTSGANLPVHVKGELNTAFIGLGDDGGYGGGWVPLAALKKVLRGILKYLGVLWLFAQLPELLKEILGSILKENEGALLNLDQEQPALRFYVGGYVFAVSVHRVQLLLQVLSVKRFHHQQQQQQAQNSAQEELAPPEINEICDYFSRRVASEPYDASRVASFITLLTLPISVLREFLKLIAWKKGFSQAHGDMATAQRARIEICLENHSESVSDDITESTLAKSNVKYDRAHSSLEFALTFVLDHALIPHMNVAGGAAWLPYCVSVRLKYSFGESNHIAYLAMDGSHGGRACWLQYEDWERCKQKVARAVETVNGSVAVGESGQGRLRMVAEMIQKQLQLCLQQLRDGPLSAGSTAS

SEQ ID NO: 55823 - protein, 830 aa, Oryza sativa
MEAFGGFFVDEKAARVENIFLEFLRRFKEADAAEAFYETELEAMRSRESTTMYVDFAHVMRFNDVLQKAISEEYLRFEPYLRNACKRFVMEQRTGENRAPIISDDSPNKDINIAFYNIPMLKRLRELGTAEIGKLTAVMGVVTRTSEVRPELLQGTFKCLDCGNVVKNVEQQFKYTEPIICVNATCQNRSKWALLRQESKFTDWQRVRMQETSKEIPAGSLPRSLDVILRHEIVEKARAGDTVIFTGTVVAVPDVMALTSPGERAECRREAPQRKNGSGVQEGVKGLKSLGVRDLSYRLAFVANSVQVADGRREVDIRDRDIDGDDSERQKFTEEEEDEVVRMRNVPDFFNKIVDSICPTVFGHQEIKRAILLMLLGGVHKITHEGINLRGDINVCIVGDPSCAKSQFLKYTAGIVPRSVYTSGKSSSAAGLTATVAKEPETGEFCIEAGALMLADNGICCIDEFDKMDIKGQVAIHEAMEQQTISITKAGIQATLNARTSILAAANPTGGRYDKSKPLKYNVALPPAILSRFDLVYIMIDEPDENTDYHIAHHIVRVHQKREEALAPAFSTAELKRYIAFAKSLKPQLSSEAKKVLVESYVTLRRGDSTPGTRVAYRMTVRQLEALIRLSEAIARSHLERVVLPAHVRMAVKLLKTSIISVESSEVDLSDFQDADDGTNVPADNDAGQPTEMDAAPQQDGPENEQAADTGKKKLVITEEHFQRVTQALVMRLRQHEESVTKDGDGLAGMKQGDLIIWYVEQQNAQGAYSSTAEVKEEVKCIKAIIERLIQRDGHLIVIDEGAAPAADDGAARRTSESRILAVNPNYVID

SEQ ID NO: 55824 - protein, 266 aa, Oryza sativa; identical to SEQ ID NO: 30609

SEQ ID NO: 55825 - protein, 484 aa, Oryza sativa
MSASGEPEKVPAAAEGEEKADGAKDAAGSGGELLYCGATNFETMGRKVVGGAQGNLVSPTRMRSLMGVDIRFVASGCTACHCVALDAEGRCYTWGRNEKGQLGHGDTLQRNLPTVVSELSKYKVIKASVGRNHTVVVTDDGKSFSFGHNKHGQLGTGSLRNEIETSPMPCLVTEATNAVCGADFTVWLSSVEGSTILTAGLPQYGQLGHGTDNEYNIKDSSVKLAYDPQPRPRAIASLSGKTIVKAACGTNHTVAVDSSGYVYTWGFGGYGRLGHREQKDEWQPRLVEVFQKHNVLPPNAIISAGAASSACTAGGGQLYMWGKLKNTGDDWMYPKPLLDLSGWNIRCMASGNMHHVVGADDSCISWGTAQNGELGYGPNGQKSSANPKKVDILEGMHVISVGCGYGLSAIVVDRSIASDRLNQLDIYDGDTSTEVEDRVEVQVAKKASASTNARSNKRKKTKDVSNQKRMMMRKMIATTMKMVK

SEQ ID NO: 55826 - protein, 351 aa, Oryza sativa
MEGRPGRRRRRRVKAPTRAAGMDWISGLPDEILHHIMSFLNARQAVQTCVLSRRWSDLWRTVPCINADFNEFDFIDYQGDDEDYNDEVAFKRFVNRMLELRDPATMMDKFWLKYKISDGYNEYKDSNVDANRWISHALQKQARVMEVVVFSFPLELDHSVFTSCYLRKIGFSCVSLHQGFFKQLDAGCPELEELFLHDCTIADEEIFSQSLKVLTIDDTEFSKANKAYISIPSVTSLTLSSPENSTPMLKDMALLTTTSVSVKFYTFSYGFDANDLRQCLWSLSGVTNLELNYEGTELTFENNLQWCPEFINVVNLTLGQWCLDANFYALIVFLQNSARLEKLTLNLAKDR

SEQ ID NO: 55827 - protein, 663 aa, Oryza sativa
MRRRSTFAVLLFAAAALSLAAGQPWQLCGRRGGGGGGTYTANSTYDTNLQSLIAALQQNASTSPTLFAAGALGAAPDAVYGLILCRGDVSSSDCYDCGTRAGQDVAPACNRTRDAILVYNQCYTRFSAAGDFLASANNSGQAPLMNSDNVTTADVAGYDRAVTELLSATLMYAVVNTTRLFATGQRVGADPGFPNIYSAAQCTPDLSPALCRSCLEDLVARWWKTFPRTTVGARIVGTRCSLRSEVSQDKFYTGAPMLKLWADGLSPAAAAASPDAAPGTTGVKNNSANKILEIVLPIVAVAIVAAVSILLWNIRKKRRRGKAEHFTGPDAAEDFESVKSTLLSLASLQVATDNFNESMKLGEGGFGAVYKGLLFRQDVAVKRLAKGSNQGLEEVKNELVLVAKLHHKNLVQLVGFCLEEGERMLVYEYMPNKSLDTFLFDEEKRRQLDWTTRFRIIEGIARGLQYLHQDSQKKIVHRDMKASNILLDADMNPKIGDFGLARLFGQDQTREITNRIVGTFGYMSPEYVTHGQYSTKSDVFSFGILVIEIVTGRRRNNGPYFFEPNEDIISIVWRHWAEGNIKEIIDHSLGRNYPEGEVLKCVNIGLLCVQQNPIDRPTMADVMVLLNSDATSTLPAPVVHIPVASFSDGSSGYSQTVTQLSPR

SEQ ID NO: 55828 - protein, 94 aa, Oryza sativa
MVRVHLKSKRHARSKKLLGEGRLKLMLNSDGELEEEQETHAERHARTVALAQQVQKSKKDSGRQRQNRRRKKRSQNHVEKKQKPLTSDKKKTQN

SEQ ID NO: 55829 - protein, 252 aa, Oryza sativa; identical to SEQ ID NO: 30640

SEQ ID NO: 55830 - protein, 220 aa, Oryza sativa
MGQQSLIYAFVARGTVILAEYTEFTGNFTTIASQCLMKLPASNNKFTYNCDGHTFNYLVEDGFTYCVVAVESVGRQIPIAFLDRVKDDFTKRYAGGKAATAAANSLNRDFGSKLKEHMQYCVDHPEEISKLAKVKAQVSEVKGVMMENIEKVLDRGEKIELLVDKTENLRSQAQDFRRAGTQVRRKMWLQNMKIKLIVLGIIIALILIIILSVCHGFKCK

SEQ ID NO: 55831 - protein, 413 aa, Oryza sativa
MEIVDKIAEPKEPLMVTGRKVQSLEAPIPIKASWKGKSSQQQQQQQQDEKDFPADGEESFLSLDSSDEGGRSSFSGASHPLEPIDMDLMKTVYVAIDEEKSEQPVCLVRGVSAKGPFIDDLSICVTGMKANAVVGAGSADGLAEEMKVPGAAVPSLATARSSQATEAVSLPPDSEEKDCVWDASLPPSGNVSPHSSIDSMGVVTAMNTMSSCTSTYKSEAVSSEPVPTMERNCGSVKGSVRGDSLESAKTSMSRASDSSGVSDDSSWSNITGGASKPHKGNDPRWKAIHAVRTRDGVLGMSHFRLLKRLGCGDIGSVYLSELSGTRCYFAMKVMDKASLASRKKLNRAQTEREILQLLDHPFLPTLYTHLRPTDSRVWSWNSVQVVICTRCDRDRQENISPSMLQGFMLQKYF

SEQ ID NO: 55832 - protein, 176 aa, Oryza sativa
MYTTFFLFFYTNSNSTLNVSLWAEQASAFEADAIHKAGLALSEGSACKWYINIDVPAIVELKDKTGTNFQPINWIEAPARAAVEEVAENKTVRELLEINPHKCKKVRFQAHVTVRRICNDKCWWYGSCQRCFKVAKPYGSTYKCTSCSNIAVAVPRYRIVVIAGDDSDDAMFVLFG

SEQ ID NO: 55833 - protein, 244 aa, Oryza sativa
MEPERSSPHEVREEIARCFDLVRRLGRGAVYLGSSRVPPTHPHYLHAAELSREIARLLDCTTWSGAGPGFMDAATQGALDAGKPVGGFKIGKEAGEWTTSNFHPYLPSESYLTCRFFSARKHGLVDAAVRNCPTDRTAIIALPGGIGTLDELFEMMALIQLERIGSTLPVPFLLLNYDSYYSKLLDFLNDCEEWGTVAPGEVASLWKVCNGNHEALEYLAQFYNVPLAERNYCISPQLKQQATS

SEQ ID NO: 55834 - protein, 182 aa, Oryza sativa
MHTVRYFDGKTYEWVGLSRQPSIMGKVKRSLSLFTPAQWDKDQWYPFMGPLRFVQVLFLCVVFMTVELNTFFLKFCLWIPPRNPLVVYRLILWWLIAIPTIREYNSYLQNSKPVKKVGAFCWLSLAICIVELLICMKFGHGLFHDPMPTWLIIFWSSVGVALVVFLLAWSWRNHLKYQRKRL

SEQ ID NO: 55835 - protein, 214 aa, Oryza sativa; identical to SEQ ID NO: 54526

SEQ ID NO: 55836 - protein, 44 aa, Oryza sativa
MVLRRTMCCQHIPSFVQGCTFLQNIECKVVAYTHNGNKIFCSKL

SEQ ID NO: 55837 - protein, 253 aa, Oryza sativa
MSGTPADGGGGGGGGGGGSGDDWFLDCGILEDLPAAACGAFPWDASPSCSNPSVEVSSYVNTTSYVLKEPGSNKRVRSGSCGRPTSKASREKIRRDKMNDRFLELGTTLEPGKPVKSDKAAILSDATRMVIQLRAEAKQLKDTNESLEDKIKELKAEKDELRDEKQKLKVEKETLEQQVKILTATPAYMPHPTLMPAPYPQAPLAPFHHAQGQAAGQKLMMPFVGYPGYPMWQFMPPSEVDTSKDSEACPPVA

SEQ ID NO: 55838 - protein, 312 aa, Oryza sativa
MCKFDCFSVSESKIICTDQAARTFLYDLDEHCVTSMPSLHAPKYSPFSVSVAIQGEKGEGESSSSSSSRRLYVMEEVLLPERGTGSSYQFEAFDYRKPGPEYLVKAWHCDPLPPPPFVRDPRYVPSPVSSYAVVGNFICISTKGIGTYCFDTVSCSWSHAGDWMLPFCGKGEYVPELKLWFGVSAKNNYAPCASDLSPVVRAEPPKPGCIWEDLNLPEDWRPCRMSDLVNLGSGRFCIIRFFQPSGNRDYMKDQIDQTIAVFSGVEVLPDDNKAAGNGKGKGKQNAKGLRMIKHKSRKCTFIEQINNVESVL

SEQ ID NO: 55839 - protein, 398 aa, Oryza sativa; identical to SEQ ID NO: 35251

SEQ ID NO: 55840 - protein, 218 aa, Oryza sativa
MDGNIVNNDVRIRNHVVQTYQGHSQEVCGLKWSGSGQQLASGGNDNLLHIWDVSMASSVPSAGRNQWLHRLEDHTAAVKALAWCPFQSNLLATGGGGSDRCIKFWNTHTGACLNSVDTGSQVCALLWNKNERELLSSHGFTQNQLTLWKYPSMVKMAELTGHTSRVLFMAQSPDGCTVASAAADETLRFWNVFGSPEAPKPAAKASHTGMFNSFNHLR

SEQ ID NO: 55841 - protein, 119 aa, Oryza sativa
MEMTRTTRIVSIFVSLVLLEQGDIYGYKYKAPRGRDNNTDHRRTTYKPTHAKTSCRMSTSDISIDKPNMVSTEANKRDLALSLISPSADSRRKTTLSSTTCWLSMPPSRRWLDMLSQLL

SEQ ID NO: 55842 - protein, 414 aa, Oryza sativa
MAGLSLRCGDCGVLLRSVEEAQAHAEATNHANFSESTEAVLNLVCAACGKPCRSQTEVDLHTKRTGHTEFTDKTMEAAKPIDLEAAPPKPAGEAMDVDASASAEPQEMVAPEVNKEMLADLEAMGFTTARATRALHFSGNSTIEGAINWLSEHQEDPDIDEPLLVPANTITEANKPSLSPEEMKIKAQELRERARKKKEEEERRMEREREKERIRIGKELLEAKRIEEDNERKRMIELRRLEKEEEKRAREKIRQKLEEDKAERRRKLGLPPEDPAAPKPSAPPPVEEKKRALPVRPATKAERMRDCLRNLKQQNKDDDAKVKRAFQTLLTYIGNVAKNPDEEKFRKIRLTNATFQERVGNLHGGIEFLQLCGFEKLEGNEFLFLARDKVDKAVLNTAGAELNSAITNPFFGVL

SEQ ID NO: 55843 - protein, 92 aa, Oryza sativa
MASSSSSSKKLSLTFVVLLLAGLVVLGEMAGAATAAAADCSTVRCIQGGYITCKNYPGKKLDGCVCLCAPTDGERCVLHLHDGSSYKCRAPN

SEQ ID NO: 55844 - protein, 366 aa, Oryza sativa
MHMEGGEGIAVAGAGGGHEAGFGLFRAADVAMTEAQEAAKEYQSSPSSPSTSPTPSPPPVAASGHGGEAAATPTMWSLGGEKMPSEAAGDNGMQMSGHSEHASLSSGRRRGRPKGSGRRQILATLGEWYALSAGGSFTPHVIIVGTGEDVAGRIMSFSQKGPRSICILSANGTISNVALSQPGSSGSTFTYEGRFEILQLTGSFTMAEEGGRRRTGGLSVSLAGPDGRVVGGVVAGMLRAASPIQVIVGSFLPNSLKQHQRRMGLQQQPSAAPALPPPMAPPPVLTAAMPISQAAPGTNGCHAPQVSSMHPQAHTGVMEHIATASGAMNLNSSSSTGFTMVGWPVSSQSMGHRPSPDINVCLTPQE

SEQ ID NO: 55845 - protein, 696 aa, Oryza sativa
MLLGALRMEERKGLMGRERDQFPVGMRVLAVDDDPVCLKVLETLLRRCQYHVTSTNQAITALKLLRENRDMFDLVISDVHMPDMDGFKLLELVGLEMDLPVIMLSVNGETKTVMKGITHGACDYLLKPVRIEELRNIWQHVVRRKFGNRERNNLDFSKECNKPQSADTDHGPYQPTCGSSDQNGRSSRKRKELHGEDDDEGDDNDYQENDEPSAAKKPRVVWSVELHRKFVAAVNQLGIDKAVPKRILELMNVEKLTRENVASHLQKYRLYLKRLGAVASQQASIVAAFGGRDPSFLHIGAFEGLQSYQPFAPSAALPSFNPHGLLTRTSAAAAFGLQELAAPSSTIQTSTGNVTVGHCLEENQQANLAQGLTAAIGQPQLQQNWIHQEGNGLSDVFSGSSLTNTLSSTLQRVPSSSLPPQELLECKQAKVSMPPSIRIPPSSSALLERTLGVSTNLGDSSISQQGALPIDGGFSADRLPLHSSFDGAVATKLDTSLAASQREIGQQGKFSVSMLVSPSDNLALAKNAKTGASSSGSTIILPLDTARHSDYLQFGGASNSLQKMDGQKQDHIQSSNIIWSSMPSTQLPSDTQIHNTQNQRLDSGSFNHNIGAHLADQTNASASILPQMKFDTRISEEKMKQKNTYDLGSSKLQGGFNSSGCNFDGLLNSIIKVEKDDLPFMDNELGCDLFPLGACI

SEQ ID NO: 55846 - protein, 383 aa, Oryza sativa
MAKGSKKKKGSSATRNPAAELTDDLIVEILSRLPAKSVRRCRRVCRRWRRLISDPHHRRKKLPQTLAGFFHLSVNESRFPVEARHFVNVSGIGGRLPHVCPSFSFLPRFERISMVDSCGDLLLCQCFESSDAFRYVVFNPCTEEWIVLPESGFHPKDRGFCARLGFDPDVSSQFHVFEFVPCDDVTGVKIYSSETREWNYRESEWCTDTGISDICRSAFCNGMLHLVSYQRSIVSVDVEGRTWRTTKVPKMEGVEEVRDWLPGSICQSEGKLYYLSQYNTVPISLSIWLLEDYSKDEWTLKHSVTNELLYEKINSKYKSSEFCYVVIVHLDCNLIYYITRDYTLMAYDMDHKESRVIQALGSDCILECLPYVPLYAETLSNRS

SEQ ID NO: 55847 - protein, 214 aa, Oryza sativa; identical to SEQ ID NO: 30361

SEQ ID NO: 55848 - protein, 543 aa, Oryza sativa; identical to SEQ ID NO: 55440

SEQ ID NO: 55849 - protein, 800 aa, Oryza sativa
MLRRQPGDAPASAAASEADLAQLSTAIAAGEDLGPFVRRAFACGRPEPLLASLRAAARDREAEIEELCRAHFHDFIRAVDDLRSLLADADALKGSLSASHAALLSSAAPLLASLESFLAARGLAGNLSSALASSRRCVRLLALANRANAHLQGGNHNLYLALRAVDAIDRDLASGPEPLPLPTLRRMLLSLVPAVRAHAEREISREFSDWMVSIRAASRHLGQVAIGRSAAARQRQEELRSKHRPLEECITLDDDGVGDLDDFAAAAATADVADGAAAASFDLTPLYRAMHIHHTLALGERFKKYYLENRKLQLTSDFDVIAATPFLESHQVFFSQIAGFFIVEDRVFRTGGGLTSRPDVDALWDSAVAKMVSVMEDNFSRMQTANHLLLITDYAALLSATMRRYGYPVGMLLDVLARHRDKYHDLLLADCRRQVVEALAADKFDQMLMRKEYEYSMNVLAFGIQSSDITPAFPYVAPFSCTVPDICRIVRSFIEDSVSFMAHGGGGDTYAAVKKYLGRILSEVVDASIQKLVDSGGGLSVSQAMQVAANMSVMERACEFFTGHAAQLCGVPLRAVERGRRDFPLRKSRDAAEALLLRLLRSKVDEFMGQSDGVTWMTDDPPAGGNEYANEVIIYLETLTSTAQQILPLPVLRRVLVAVLAHISERIVGLFLNDSVKRFNASAVTGIDTDLKMFEAFGESMSSLFVDSDQESAANEMKAALVEARQLVNLLMSNSPENFLNPVIREKSYNKLDYKKVAAISEKFRDSSESYFSTFGTRGARQNPKKKSLDTLIKRLREAS

SEQ ID NO: 55850 - protein, 439 aa, Oryza sativa
MEDCSSWIHGYANANATAGNNGFMCGYAASCSPVEFQQQQQLVGSQIEHHLNQISMQMGMDDESAVYDGASMVDVLLMASSSPHHHAGAGSFQYSSPTSSSASFRSASVSCSPESSAAATTHFLGPPAPSAAAAGFHYPEVSSQAPLPLPLPPYEPQHGQYTTVLSPPPPAPELPATTTPATGGAFRRYARHLRPRRLPKPGGCGQRMFKTAMSVLTKMHVAATYNRQYYYQQAAAAAASASAAEAPPSGNQLQHMISERKRREKLNDSFLALKAVLPPGSKKDKTSILIRAREYVKSLESKLSELEEKNRELEARLASRPAAAAKNDKGETAAAPAPEAGDETKRKDLVEIEVTTSGGGAGAADAAAAAGGDQETCTLNVDLRGGGGGGGMSTTDVVLRTLQCLREQIGDGASLVAMSTSAGSGGRPPRANLTLQLKV

SEQ ID NO: 55851 - protein, 457 aa, Oryza sativa
MADSSKQVGMDTDGGGAAAAAVDGQNLPVLVTNRKRELTLEGKALPVDCSGRRRIDLEKDLSMIGSPFTKHTSDKNGDNNEMRDVDERCTMDVDNTEMRDVVHERDARDVELGDMAAAKELEQGHMASVKEESELIKVVEVLHMARCREITEYNLKLGRYVPTRFCFRNIALFDLDKESKLGRGPPVKSLNCSEYTWMVHSMNISSIKVTESDVGYPISVFGTVLARDEYDFRCVYLFRRDRDDPQLITSPEDTLTLTGPNRALGALDRVYFEFHLKVRVDGDVDKVFCKGVREHHADACLIRPVTLWLRSCLSTVILVYSPVESAIEACVAVNIQGVVSNFNGKVTAWTTEDHENKIVLYESKVAGTKTVLGVDGSVELTRRFVAVELEDILVLNICVFEGEDEAEFELYLGQNDEECTLEQGPYKLQVKISWTAAMKKRWRERSMKLGRKFVLVR

SEQ ID NO: 55852 - protein, 483 aa, Oryza sativa; identical to SEQ ID NO: 54809

SEQ ID NO: 55853 - protein, 156 aa, Oryza sativa
MEKMKVDSDQEILLLKKLVKVMERKVEHLEQQLEKSHSSSAPLFGVTNDDVEGPSILLTGGHNGINWLSSLDSYCPATDILETLMPMSSARAYAAVATLKDHVFIFGGWNGIRSLWYNTVECYNRGANKWIGLPCLNHEKGHLAGATLNAMCSCCG

SEQ ID NO: 55854 - protein, 444 aa, Oryza sativa
MAAAAASLVSLPLLSAIFGAAIALLFLSGYLRRKRAAIAHLPPSATAAAPDQPKQVRPSNQNQPKKGHQRSHHAVDKDAAKKHHHLDVNTLRGHTDSVTALHFSDDACNLATVCADGAVRVFRVDDVSSKSFKILRINLPAGAHPTAIAFSQGASSVVVAAQALLGSSLYMYADVGAPPAGGNKQQGKLSPPEIKWEHRKIHGKESVLNLAAARATYGTGDGSTILISCSEATDIKIWHGKSGKELGTVDTNQLKNNMADISPNGRFIAAAAFTADVKVWEIVYSKDSSVKEVNKVMQLKGHKSAVTCLCFALNSEQIITASKDGTIRVWNINVRYHLDEDPKTLRVLPIPLHDSKGSVCQYDHMSVSPDEKVLATTSGSTLQWLCVETGAVLDTAEKAHEGDITGIAWAPRTIPNGGTPAFVLATAGVDKKVKLWLAPKAIST

SEQ ID NO: 55855 - protein, 57 aa, Oryza sativa; identical to SEQ ID NO: 38575

SEQ ID NO: 55856 - protein, 222 aa, Oryza sativa
MASLANSSVHLLLLVVVLAAAADAVTFTIVNKCGYTVWPAALPSGDGNQLDPGQSWAVYVPAGTKGARVWGRTGCGFISGGSLGQCQTGDCGGTLRCAAVGAPPVTVAEFSLGQASKDDYFDISLVDGFNAPMAIVPAAAGGRRCPRGGPRCAAEITLQCPGELRAKAGCSNPCRGNSTCGPTKDTEFFKKLCPETVTYARDGQGTTFTCPAGTDYQIVFCP

SEQ ID NO: 55857 - protein, 224 aa, Oryza sativa; identical to SEQ ID NO: 31621

SEQ ID NO: 55858 - protein, 227 aa, Oryza sativa
MPPKSDSVEGIVLSFVNEQNRPLNSQNVADALQKFSLKKTAVQKALDALADSGQISFKEYGKQKIYLARQDQFNIPNGEELEEMKKANIKLQEELADQKKAISEVESEVRGLQSNLTLAEIKSKEAKLQREVQEMEEKLNKLRNGVILVKPEDKKIIEESFSEKVNQWRKRKRMFKELWDNITENSPKDQKEFKEELGLEYDEDVGVNLQSYSDMLTSLSKRRKVSR

SEQ ID NO: 55859 - protein, 281 aa, Oryza sativa; identical to SEQ ID NO: 30448

SEQ ID NO: 55860 - protein, 279 aa, Oryza sativa
MSHGDTIPLHSSSAQSDMDEIESLIHAAPPSAAAVLPARPPSPPRASIPVSSSPPLLPPPVAGSKPQLPPFSSSSSVASSSSPPLPSSVSVAIAGDGFGPPPNTLTEPVLDTVKRDLARIVSNLKLVVFPNPFREDPGKALRDWDLWGPFFFIVFLGLTLSWSASVKKSEVFAVAFAVLAAGAIILTLNVLLLGGRINFFQSLSLLGYCLFPLDVGALICMLKDNVLLKIIAVVVTLAWSSWAAYPFMSAAVNPRRKALALYPVFLMYVSVGFLIIAID

SEQ ID NO: 55861 - protein, 496 aa, Oryza sativa
MPPKLRSSKGVAPSPSTGEGGESHTSKKNPAPATAPTAGSVTRSRARDTTERARASGGGTALDPKKRKRTEESAASSAAAAGPVPKKMTTAGSTTLASRPLPLRYPPYPTLPPGTRPTSRQYLDPVLDRKYLDSVLEWAKERRRIAKLSKKAQCKDIPTLRHSPMDPITADAVVTSQDKAMVLRVARSVVSVSSTMPDGGGLISRCTGVVIGWDGANKRAKILTAASVVCDFHGELHNPALKLSVSMPNKTTTEGRLLFYNVHYGIALLEVMGDYKLEVPSFGSGTNYGQVIFALGRGENMSLMVSHGTISWTDYPVLLRNHNMFLSCDIPEGGSGGPVVDHGGNMIGIAFVENPGPVFISIKTIMTCMEMWDQFSRVARPLLGMQLKSVELLDVSIQEELCRDYNITSGFIVSQVLVDSTAEKLGIRRGDVIDFQDIDCSTLSQLEDHLLSLGWGYLKGMHLTVDLKVEVHNLFDSYRESITFPVQFTDASKQVN

SEQ ID NO: 55862 - protein, 145 aa, Oryza sativa
MGNCGTREENAVVAAHAQVQQLHLLQHPVKNAVAERKHTRISSDMSDPSTPRKIEVEDAKNISIYNDVIDLLFELETITKSFRADYLLGEGGFVTVYKGYIDENVRVGLKSLPVAVKVLNKDGHQGHRGWLVSCQLVQYSLWLPS

SEQ ID NO: 55863 - protein, 368 aa, Oryza sativa
MGYLPSLGGKAAHLVSDLATVILNPVSERESQRHPSHLPEATEVQENIYEDDDDDNSVKNSEIPNGPDTSSFRAFLMSFMSSSNSSSDSIEIIPEHNMNMEYPTLTPVGKGSNGRKGLFSRGKHSIGKIINKAGRIGGFRQKPSYSIDGETVQTEYDAPGLELKGSKESASHDKLPAMSEPSMLLSETMRTVLYTSLPVLVQGRNWMLVYSTWRHGISLSTLYRRSMLCAGYSLLIVGDRKGAVFGGLVEAPLQPLIKKKYQGTNNCFVFTNIAGRPVIYRPTGANNYFTFCSTDYLAMGGGGHFALYLDGDLLNGSSSTSETFNNPCLSRSREFEVKDVELWGFVNASKYDEMLTICRTEKQGIWNL

SEQ ID NO: 55864 - protein, 354 aa, Oryza sativa
MADEPWRLPNIVQELAAGVQEPPSRYLQDLAGGDQLAGAEIPEPIPTIDLGRLSGSDGADEAAKLRSALQNWGLFLVSNHGVETSLIDAVIEAAREFFRQPVEEKKKLSNLIDGKRFQIEGYGNDPVQTKDQILDWSDRLHLKVEPECDRNLAFWPTHPKSFRDILHEYTLKIKTVKNDILLALAKLLELDEDCLLNQFSDRAITTARFNYYSPCPRPDLVLGLKPHSDLCALTVLLTDKEVGGLQVLRDGTWYSVPAVRDYSLLINIGVTLEIMTNGTFRAPLHRVVTNAERERMSVAMFYAVDGEKEIEPVAELLGLKQQSARYRGIKGKDLLIGHYEHFSRGGRVVDSLKI

SEQ ID NO: 55865 - protein, 237 aa, Oryza sativa
MIEAESQMAEAASYEEQRRRQVEANKRKLEELRLHHLSAAVRESASKPSPVKQRKRKARALPGAGEDAPLRRSGRVANLPEKPKYRDELQDFEKRIRRSYGGKRRDLSNRVYATDEQRDYAINAAQELEEELGSDYPIFVKPMLQSHVTGGFWLSLPTHFSRKYLPKRDETIRLVDEEDDEFDTLYLANKRGLSGGWRGFSIAHKLVDGDCLVFQLIQRTKFKVYIIRASSYYETDD

SEQ ID NO: 55866 - protein, 709 aa, Oryza sativa
MQMQMQSRSRIRGRDPPPASSGGRYRRRSPSPRRHHRAPPSNPNPHRDRRTPDRPRRHHHEDSLPLHVHLPPPPDALLTAAADRRSRADVLLEAGRLAARYLVAQGVIPEHRLRAREDPLPAARNHDVDDPRSRRNADFPRDRGDDDRLSRRSGWDRRSNSFDSRRKYNDAASADRSARRSHDYDDQRRPTMSRSYSQNDRRVSSDSRLDRRRRSRSRSRSRSRSRSRSRTRTRSYNYGSRRDSDWRASGADLDHSKVPEPGIVRDGDADVGYGDADDVPRDLKAPPRSVVVMETKESASQAAANEDTAEVESEIIEVDQAQDIYGDDDDDGDDAVAAFNYPSVAEINVTQHKLSNSNEDVVHPSQSDEEPLHRQSQFSDAEEGMEGPISPRDSCLVEPVAEEVRDGMEAPQSEVETDNADLTKDEQDLPAWYGIFDLNVVESQENCEMVEISNDSPLDNGRDSVPDQVGQMSQGANCVTSGTQGQDEHAFDNHQSEDEQVPLNQRNGTDDFNNEQGVGNQTGDEHGQDNHQLEDDQMHINHVMDVHTLDNGLMNGEEMLLKRCADEHTDHGHLVETEEMLLNQGQSTSVQVLENYNMNGEQVQLNHDADEHSGDDRPIKNEQMLLNHVMGVHDLDNHDQNSEQMLLNNGAGKQAADSAQLQEDQMLLDQAADGQATLHGQSIGQMIPVINLEDDYEEQSDTIEFSESK

SEQ ID NO: 55867 - protein, 220 aa, Oryza sativa
MPGLTIGDTVPNLELDSTHGKIRIHDFVGDTYVILFSHPGDFTPVCTTELAAMAGYAKEFDKRGVKLLGISCDDVQSHKDWIKDIEAYKPGNRVTYPIMADPSREAIKQLNMVDPNEKDSNGGHLPSRALHIVGPDKKVKLSFLYPACVGRNMDEVVRAVDALQTAAKHAVATPVNWKPGERVVIPPGVSDDEAKEKFPQGFDTADLPSGKGYLRFTKVG

SEQ ID NO: 55868 - protein, 881 aa, Oryza sativa
MSDADGFGCEHRRPSKRRRDGPDHALLPVSREVLMGHPDDPAAAAAAVGAESSSASSYLGVVAAAASASASAAGGFSCGAHFFVRATDSRTVSMHAAWGDTVGAVLAHLADRGYGRDLRLVYAGRQLAPETALADLRLPPDSTLHLLSRLRSTPYPDAWQLASYIASTAAAAKSDPAHTSSAANINELVKEFILCAHRANMRQRHDRDSPLFDAQPTGDHAAQYLEIFRQAGAPFALVRLYAANPSSASHHHAENAIKCFLTMDPSALPPDVLPVMAPVLLEFCGLLSFSVGKRDELYISSRSMLATVLSLPSGLPPCIKSPSKLIEQVLPFAEEIVGVVMDELASLDMTVSSKNLEDLSNFFKVLRQQALRWVPNGGPLPKNLYNSERGHNDTWVWKLHEMSMNLLNRVDECLKRLEMDLSLSSENRGVNISQSRWVARSHMLVMLTQLDFISMIYEDLAHNLRLVLLAHRDPLNALVRCSKRNEHLHWLVKHKDLLCFESRRNLVLMMLPEGKDEYGELHEMLIDRQHLLDESFEYIIQARPSELRSGLFMEFKNEEATGPGVLREWFCMVCQALFSPQQVLFSPCPSDRQRFFLNGTSAVDPLHLKYFIFSGRIIGLALMHRVQVGITLDRTLFLHLAGRSIKLEDISAADPVMYASCKRILEMDAAVVDGLELTFSRDVHELGSRRTIELCSGGKDLHVNIRNRELYIDLLIKSTFVDSISVQLTHFVRGFSDILVDPELQKVFFEFLDLEDFDGMLGGSNKTINLEDWKLHTQYNGYKEKDRQIIWFWKAVESLSIEQQRQLLFFWTSVKYLPSDGFGGLASKLYIYKVSESADRLPSSHTCFYRLCLPAYPSLKVTRNQLQKITQEHVSCSFGTW

SEQ ID NO: 55869 - protein, 75 aa, Oryza sativa
MLKPTFCKRVFPARTCLLVALIKKHPLHGCYVEMSFLSGVTWLLLQKTVLYLRSLLLLWGTKKKNLYVVISGQFA

SEQ ID NO: 55870 - protein, 142 aa, Oryza sativa
MDDASISTVKPTRRRRGAGWQGRSALARSRRGRSGGRTPPTRSAGGGARSRTPTCRPCPSCRTSGTTPPPRPPRRAARLAPCTGASPRTRPPPRRGVRGPPPGGGRSPPPPGPPARGSTRRTRPGTRTLALPAGPGAGAPGS

SEQ ID NO: 55871 - protein, 74 aa, Oryza sativa
MRTACLYNESIVGFYQDATTGRLKRLLPVRLRGLLLEEKAHYMGNDNGRGIERRNTPKEKEKSEGKHQGDVSKI

SEQ ID NO: 55872 - protein, 345 aa, Oryza sativa
MEAEKKPPAVSDVGAWAMNVVSSVGIIMANKQLMSSSGYAFSFATTLTGFHFTVTALVGWISNATGYSVSKHVPLWELVWFSLVANTSITGMNLSLMLNSVGFYQISKLSMIPVVCLMEWVLNSKHYTTKVISAVVVVAAGVGICTVTDVEVNAKGFICACVAVFCTSLQQITIGSFQKKYNIGSFELLSKTAPIQAVSLIILGPFADYYLNGRWLLNYNFSTGATFFILLSCSLAVFCNMSQYLCIGRFSATSFQVLGHMKTVCVLILGWILFDSALTVKNILGMLLAVMGMVVYSWAVETEKKASAPIPRNKSDMLDDSEDVPLKARVSGLPSSDLEEDEMKS

SEQ ID NO: 55873 - protein, 315 aa, Oryza sativa
MRDLQLSLNQTQRVRLEAALHELQTVAPAAAVTVADTIPVNDEDNILKGHGTSDQDGEVVATLCGVVERVNKLVYVRTLRARYKPEVGDIIVGRVIEIAPKRWRLEINFSQDAVLMLSSMNLPDGIQRRRTAVDELNMRTIFEENDVICAEVRGFQHDGSLHLQARSQKYGKLERGQLLVVPAYLVKRRKQHFHHLEQYDVDLILGCNGFIWVGEHVVVGENANMMENKLNLSAEVENFTPLETRKHICRLANAVRVLSALGFTLTVELIIETAEASVSSNIEINNMLGAEFYVQTAEREVKRRADLLRKKSGAR

SEQ ID NO: 55874 - protein, 322 aa, Oryza sativa
MLSARRAGAGGAAGKTSHARPCNPGYPRRSSVPMTGGDATRPAVARALRLPGSGGGAGFQRREPHRWLRPCSSSRSGDGAAAVLASRSGSSDMGLGVSSFSPCSLPRRVDAPRRRPVWCSPAAPPPPPPPRVEVQSVRKRRMSEEWEALKAAIADMFRPLLRNLADICSLRSAYDFEDYQIGMLFGAFLGYVGCYQLWKAAPSVFVDAALAFVFYKLSVVSSELHRQRKTNSLITRLKFGTILIMVMKDIKKNYVLLDIIRMPVFFLYICAFVFDVAGMKKYARRSLISLFNLLKSRGGIQEIYRIMWYPGYISPYDDSADW

SEQ ID NO: 55875 - protein, 386 aa, Oryza sativa; identical to SEQ ID NO: 35342

SEQ ID NO: 55876 - protein, 689 aa, Oryza sativa
MIRKSKPAKATVAKHQSDKNSEKQQKSPMKSSPVKVERRDGNQITTGKNISPKSNKGSASIDNQKVNIVDRGSLQWTEKYRPKVPNDIVGNQSMVKQLHDWLRSWEDQFLHSGQKGKGKKQADSGAKKAVLLSGPPGIGKTTTAKVVSQMLGLQAIEVNASDSRGKADSKIEKGVGGSTSNSIKELISNATLNYSNNRLKRPKAVLVMDEVDGMSAGDRGGVADLIASIKMSKIPIICICNDRYSQKLKSLVNYCLLLNFRKPTKQQMGKRLMEIAKKEGLQAQENAMEELAERVHGDIRMALNHLQYMSLSQSVVKYDDIRQRLNSSTKDEDISPFTAVDKLFGFNGGRLRMDERIDLSMSDPDLVPLIIQENYINYRPITVGKDDSGVKRMNFLARAAESIADADIVNVQIRRYRQWQLSQAACLSSSIVPAALMHGNREILEAGERNFNRFGGWLGKYSTTNKNIRLLEDAHSHILASQQANLDRESLRLDYLTLLLRQLTDPLKTMPKDEAVQKVVEFMDTYSLSQEDFDTIVELSKFKGHPNPMDGIQPAVKSALTKAYKQGSSSRVVRAADLVNIPGMKKPLKKRVAAILEPVGESLPEENGVASSEGDEEDSSDAENNDELVPGDTKPKLDLQSDKKKGIQVQLDLKSNGNGLNSKKMPAGRSKASGSAGKAAGGSGGKRKR

SEQ ID NO: 55877 - protein, 241 aa, Oryza sativa
MRTSLVRFFLTILANTFLHSPYQHSSPPESSQCSTPLGSESGGKRRRGRRGKQKGLGEVVSVHEKKEAKTSPFPLLLLCRATRRRITEVYDEMYQIVRAKRNDTGKVHEFINCLVDARNELLHKSEMVQRSCRIKKALLSNPCSRRANSYDRLCEQVHKLEAEHKRLKKDADIYNYIQEQLQMSESYKLLIELSALVEKAEREDALATEAAEMTFEELLAQEKSDAAFWQRHRKLTSILPK

SEQ ID NO: 55878 - protein, 346 aa, Oryza sativa; identical to SEQ ID NO: 29907

SEQ ID NO: 55879 - protein, 402 aa, Oryza sativa
MAPPPPSPSPSPASGAQYAHQFLNTALSQRGPSALPYAEDVKWLIRNHLVALADAFPSLHPKAALFTHNDGRAAHLLQADGTIPIHHAGASYNLPAVLWLPEPYPRSPPLVFLSPTRDMVIKPHHPLVDRSGLVANAPYLRSWVFPSSNLVDLVRSLSHLFGLDPPLFTRSPNPPPPSPSPPIPATPLPRVHPSSSSSPSPSPYRFPASPQLAARPPPTEDPAEVYKRNAIAKLVDMAYADAATLRPVREAEVDTLFAMQATLRSRGEVVSDGVRKMGEEKEALERRLQDVMMATDLMEAWVMENTKGAAGDTEADEAIETADVLSKQMLECTAADLALEDTIYALDKAIQEGSVPFDGYLRSVRALAREQFFQRVLSTKVNKAQQQAQVARMAARAPQYAS

SEQ ID NO: 55880 - protein, 331 aa, Oryza sativa
MDLDPEGLFRDDSDEDDDNVQEREANKEMVVYLIDASPKMFTPATKADEKEETHFHTIVNCITHALKTQIIGRSYDEVAICFFNTKEKKNLQELAGVYVYNVTEREPLDRPDARLIKEFSCIEDSFMSNIGSRYGITSGSRENTLYNALWVAQALLRKGSVKTVSKRIVIFTNEDDPFGGLTGAVKTDMIRTTIQRARDAQDLGLSIELLPLSRPDEEFNMSLFYADLIGLEGDEIVDYLPSSGEKLEDMTNQLKKRMMKKRKVKTLAFAITNDVCIEVNTYALIRSTTPGAITWLDSISNLPLKAERSFICNDTGALIQDPQKRFQVYNE

SEQ ID NO: 55881 - protein, 977 aa, Oryza sativa
MVLGLGVANQPAMGNSTSRVVGCFAPADKAAGGGVGLEFLQPLDEGLGHSFCYVRPGAITDSPAITPSNSERYTLDSSVLDSETRSGSFRQEVVVVDDLAAAAMAGLQRPSKSFSETTFRTISGASVSANPSSARTGNLCVSLAADVQEPAAAFESTASFAAVPLQPVPRGSGPLNTFLSGPLERGFASGPLDKGAGFMSGPLDKGVFMSGPIDSGNKSNFSAPLSYGRRKAGLGQLVRSISRPMRSALSRTFSRSSQGTGWVQRFLLHPMAQLSLSRDAKGTSEDSHNGLEAGLPELEYSVTRNLQWAHGKAGEDRVHVVLSEEQGWLFIGIYDGFSGPDAPDFLMSNLYKAIDKELEGLLWVYEDSPEGSAQVSTLGEGESVAVPQDLPDGGDILFQADSVESEQLVNSEEQDVSNVKISDGGASQVQMDLNTSGQRDLVLQASSNQKLNAGEIVEEKVGADMGNNLQSTESYNSGRDISNTDVNTSFGCTSDVNTSTCCNEDVKSPKEIRSRRLFELLEMELLEEYNRNVSKLSPEGMKGRSIFNMQAGTTEESSRDIAELSRSSMAATGECLDDFENDKHSRSGDGVLGVDPKECNECSISSSSSGHKQILRRYLFGSKLRKMYKKQKLLQKKFFPWNYDWHRDQPHVDESVIKPSEVTRRCKSGPVDHDAVLRAMSRALENTEEAYMDVVERELDKNPELALMGSCVLVMLMKDQDVYVMNLGDSRVVLAQDNEQYNNSSFLKGDLRHRNRSRESLVRVELDRISEESPMHNPNSHLSSNTKTKELTICKLKMRAVQLSTDHSTSVEEEVSRIRAEHPDDPQSVFNDRVKGQLKVTRAFGAGFLKKPKFNDILLEMFRIDYVGTSSYISCNPAVLHHRLCSNDRFLVLSSDGLYQYFSNDEVVSHVAWFMENVPEGDPAQYLVAELLCRAAKKNGMDFHELLDIPQGDRRKYHDDVSVMVISLEGRIWRSSG

SEQ ID NO: 55882 - protein, 470 aa, Oryza sativa
MAAAAAAASVASQAQAVLRGRLCDQAVVHSALRSSPDTNYSKLKYLVASSVSEACNNSVLLLGPRGCGKAAVRFSFLVYSSAPLSAVFSDAGVVFDEMCQWAIYDFTLWVVSAWTEVVDMVLDDLKKDHPDAISVIRLNGMLHSDDNCATKEIARQLCLEHQLSFSKMASSDDNTEFMIDMLRECGLAHKTIIFVLEEFDLFAQGKQRLLYSLLDAMQSLTSQAVVIGVSCRLDADQLLEKRVRSRFSHRKLLFVPSSVDSLQRLMEHLLALPEDSPLPTKYVREYNARITSIFNDKKFKGILSSLTDADATTSHILRFLFRVVSYMDIDSGLLSMQSFMNALSSMQRQPKMDSLQDLSILELYILVCMNRLEDKEKSSYNFITIMKEYKSVQDAYKTSDKYSHTVCFRAFEHLLDRELISFADNKGRNQALEYRPVKLLISSRELAESLKLNTTCPAVLQKLLDRERYM

SEQ ID NO: 55883 - protein, 102 aa, Oryza sativa; identical to SEQ ID NO: 36278

SEQ ID NO: 55884 - protein, 602 aa, Oryza sativa
MPPPVSSPSAPRLSPSAARAAEQHCLRLLAASSTPTSLLQSVAFLLKSGLHANSLVLTRLFAASASAAPALLDPLVTALLRPSVPLDAFLANTLIRAHATSPIHSLRLRAAAFFPLMLRGAVVPNKFTFPFLLKACAALPGSPDVGLQAHAAALKFGFATDQYVSNTLIHMYSCFGGGFLGDARNVFDRMPKESAVTWSAMIGGYVRGGLSSDAVDLFREMQANGVQADEVTVIGVLAAATDLGALELARWVRRFVEREGIGKSVTLCNALIDTLAKCGDVDGAVAVFEGMQQRSVVSWTSVIDALAMEGRGKEAVRVFEEMKVAGVPPDDVAFIGVLTACSHAGMVDEGCGYFDAMKVEYGIEPKIEHYGCMVDMFGRAGMVERAMEFVRTMPIQPNPVIWRSLVSACRAHGRLELGESITRSLLHEYPAHEANYIMLSNVFALTQRWKEKSEIRREMSKRGIKKVPGCSIVELDGEVHEFIAGDESHPQYKDIYRMVEEMARELRRVGHIAATSEVLLDLDEEDKEGALQWHSEKLAIAFALLRTPPGTQVRVVKNLRVCSDCHAAIKCISQVYRREIVVRDRSRFHRFKDGSCSCKDFW

SEQ ID NO: 55885 - protein, 1233 aa, Oryza sativa
MSMYALLRSSEQPPTEEQIEDSLAGNLCRCTGYRPIIDAFRVFSKRDDLLYNNSSLKNADGRPICPSTGKPCSCGDQKDINGSESSLLTPTKSYSPCSYNEIDGNAYSEKELIFPPELQLRKVTSLKLNGFNGIRWYRPLKLKQVLHLKACYPNAKLIIGNSEVGVETKFKNAQYKVLISVTHVPELHTLKVKEDGIHIGSSVRLAQLQNFLRKVILERDSHEISSCEAILRQLKWFAGTQIRNVASVGGNICTASPISDLNPLWMATGATFEIIDVNNNIRTIPAKDFFLGYRKVDLKPDEILLSVILPWTRPFEFVKEFKQAHRREDDIALVNAGMRVYIRKVEGDWIISDVSIIYGGVAAVSHRASKTETFLTGKKWDYGLLDKTFDLLKEDVVLAENAPGGMVEFRSSPTLSFFFKFFLHVTHEMNIKGFWKDGLHATNLSAIQSFTRPVGVGTQCYELVRQGTAVGQPVVHTSAMLQVTGEAEYTDDTPTPPNTLHAALVLSTKAHARILSIDASLAKSSPGFAGLFLSKDVPGANHTGPVIHDEEVFASDVVTCVGQIVGLVVADTRDNAKAAANKVNIEYSELPAILSIEEAVKAGSFHPNSKRCLVKGNVEQCFLSGACDRIIEGKVQVGGQEHFYMEPQSTLVWPVDSGNEIHMISSTQAPQKHQKYVANVLGLPQSRVVCKTKRIGGGFGGKETRSAIFAAAASVAAYCLRQPVKLVLDRDIDMMTTGQRHSFLGKYKVGFTDDGKILALDLDVYNNGGHSHDLSLPVLERAMFHSDNVYDIPNVRVNGQVCFTNFPSNTAFRGFGGPQAMLIAENWIQHMATELKRSPEEIKELNFQSEGSVLHYGQLLQNCTIHSVWDELKVSCNFMEARKAVIDFNNNNRWRKRGIAMVPTKFGISFTTKFMNQAGALVQVYTDGTVLVTHGGVEMGQGLHTKVAQVAASSFNIPLSSIFISETSTDKVPNATPTAASASSDLYGAAVLDACQQIMARMEPVASRGNHKSFAELVLACYLERIDLSAHGFYITPDVGFDWVSGKGTPFYYFTYGAAFAEVEIDTLTGDFHTRTVDIVMDLGCSINPAIDIGQIEGGFIQGLGWAALEELKWGDDNHKWIRPGHLFTCGPGSYKIPSVNDIPLNFKVSLLKGVLNPKVIHSSKAVGEPPFFLGSAVLFAIKDAISAARAEEGHFDWFPLDSPATPERIRMACVDSITKKFASVYYRPKLSV

SEQ ID NO: 55886 - protein, 157 aa, Oryza sativa
MATVEVQAVAAAPSLAAEEAPAVVEAVQDQEPVVAAVEEEEATAAAAAAAAAQVEETKPADDQAAAAPAETVAEAEAEAKEAEPAAAEEAEPEAETAPPAAIAEAEAGEAKEPEPEAEAEAAAAPVEEAAAAPVEVAEEAEAAPPAAPEVAAVEATE

SEQ ID NO: 55887 - protein, 94 aa, Oryza sativa
MCMDRAAVPVKRVWLGLAARLGLRRTSGLGKLKKEVRTCEYHDVHIMWEMLRKTDAPVPMAEKEAAAAAAVAAAAGARRRKAAWRRFLYYCCAF

SEQ ID NO: 55888 - protein, 509 aa, Oryza sativa
MSTGETLRAELSSRTPPFGLRLWIVIGISIWVVIFFILGFMCLWSIYRRKPKKSFDKIPVSQIPDVSKEIAVDEVREHAVVENFRVQESHAISVQEKHYEKDSGKMLAHLVRSKSSDADNLSQCSSVYQCDRAGSSYSGDEGSSGNARRHFSQYATVSASPLVGLPEFSHLGWGHWFTLRDLEHATNRFSKENVIGEGGYGVVYRGRLINGTDVAIKKLLNNMGQAEKEFRVEVEAIGHVRHKNLVRLLGYCVEGIHRMLVYEYVNNGNLEQWLHGAMRQHGVLTWEARMKVVLGIAKALAYLHEAIEPKVVHRDIKSSNILIDEEFNGKLSDFGLAKMLGAGKSHITTRVMGTFGYVAPEYANTGLLNEKSDVYSFGVLLLEAVTGRDPVDYGRPANEVHLVEWLKMMVGTRRSEEVVDPDMEVKPTIRALKRALLVALRCVDPDSEKRPTMGHVVRMLEAEDVPSREDRRSRRGNTANADTESKTSSSEFEISGDRRDSGPSARFQP

SEQ ID NO: 55889 - protein, 80 aa, Oryza sativa
MQRIFPKASLSNLVRGGVCHEALTISELGIYGAYLRNNDKVVMNEQSGYLMRTKVSSSDEGGVAAGFAVLDSLYLTDKAM

SEQ ID NO: 55890 - protein, 710 aa, Oryza sativa; identical to SEQ ID NO: 37720

SEQ ID NO: 55891 - protein, 362 aa, Oryza sativa
MRIEELPGDSGGGGGDGGGGGGGGALLQLRRGAAAAAAAVEEEGGVVMRVAFDAKRAAVGVGARMLFYPTLVYNVVRNRFEPHFHWWDQVDEHVLLGAVPFPSDVLRLKELGVCGVVTLNESYERLVPRCLYEAHGIENLVLPTRDYLYAPSFENLCRAADFIHRNALCGKLTYVHCKAGRGRSTTVVLCYLVQYKQMTPAEAYEHVRLRRPRVLLASAQRQAVEQFYQLRVKKSGKSICLDSPIMKPPLFLATRNLIAFDEKTFVMVSKSDLEGYDADTLAVNVGSGLWEISLVYRVQFASQAAFAGFSYLWVRCRAPRKNKEALPVPESNNSVGSESCSLEAEQLAKPHPCLLQGVMVNP

SEQ ID NO: 55892 - protein, 662 aa, Oryza sativa
MPRAVSDGGEAIDADIASRTSSHSHMDGGHHHHHHGHKVEFPPKKKLIDEFTDAVKETFFADDPLRQYKDQPMSKKVLISLQNFFPVLDWGRHYTFRKFRGDLVSGLTIASLCIPQDIGYAKLAGLLPNYGLYSSFVPPLIYAMMGSSRDIAIGPVAVVSLLLGTLLQNEFDPKKNQEEYTRLAFTATFFAGVTQAALGFLRLGFIIEFLSHAAIVGFMAGAAITIALQQLKGFLGIANFTKKTDIISVMKSVWGNVHHGWNWQTILIGASFLAFLLVAKYIAKKNKKLFWVAAIAPLTSVIISTLFVYITRADKHGVVIVKYIKKGINPPSASLIYFSGPNLMKGFRIGVIAGMIGLTEAIAIGRTFAGLKDYKIDGNKEMVALGTMNIVGSMTSCYVATGSFSRSAVNYMAGCQTAVSNIVMSIVVLLTLELITPLFKYTPNAILSSIIISAVLGLVDYHTAYLIWKVDKLDFLACLGAFFGVIFSSVEYGLLIAVAISLAKILLQVTRPRTVLLGNLPRTTLYRNIDQYPEATLVPGVVIVRVDSAIYFTNSNYVKDRILRWLRDEEERQQEQKLQKTEFLIVELSPVIDIDTSGIHALEDLFRALEKRKIQLILANPGPAVILKLRSAKFTDLIGEDKIFLTVGDAVKKFAPKAVENV

SEQ ID NO: 55893 - protein, 122 aa, Oryza sativa; identical to SEQ ID NO: 32249

SEQ ID NO: 55894 - protein, 194 aa, Oryza sativa; identical to SEQ ID NO: 30365

SEQ ID NO: 55895 - protein, 567 aa, Oryza sativa
MASSALICDTEQWKGLQAHVGEIQKTHLRHLMHDVERCKAMTAEYEGIYLDYSRQRATGETMEKLFKLAEAAKLKEKIEKMFRGDKINSTENRSVLHVALRAPRDEVINSNGVNVVPEVWGVKDKIKQFSETFRSGSWVGATGKALTNVVSVGIGGSFLGPLFVHAALQTDPEAAESAKGRQLRFLANVDPVDVARSIKDLDPETTLVVVVSKTFTTAETMLNARTLKEWIVSSLGPDAVAKHMIAVSTNLELVEKFGIDPKNAFAFWDWVGGRYSVCSAVGVLPLSLQYGFPIVQKFLEGAASIDKHFRSSSFEKNIPVLLGLLSVWNVSFLGYPARAILPYSQALEKFAPHIQQLSMESNGKGVSIDGVQLPFESGEIDFGEPGTNGQHSFYQLIHQGRVIPCGFIGVVKSQQPVYLKGEIVSNHDELMSNFFAQPDALAYGKTPEQLHSEKVPEHLIPHKTFQGNRPSLSLLLPSLSAYEIGQLLAIYEHRIAVQGFLWGINSFDQWGVELGKSLASQVRKSLHASRVEGKPVLGFNSSTTSLLTRYLAVEPSTPYNTTTLPKV

SEQ ID NO: 55896 - protein, 281 aa, Oryza sativa
MAHSLPLDVWGWITNLPPFSQWRSNAMSLCICPTPSASESSQPSLNLSVVKTPPTQPSFVTFSIFANYRVPISLWTSKPVHLKSYTQQSLDEQEMLELFVDIVDWVLRSGPNKKLSFQFPRAQIHGNLKDVFNIVFLSLAFLVCIYEAPHALRCRCLESLRTQLTGPKCKDAAKTFVRMLGANLEEQWMQTMNLAVTNWIVEQRSSHHSFGVPSPLFSYALSASGLWKVQLYCPLIAMSMEDPAVPTQDERLLFSLTYQQLEGVIQLAYKTIRRDNWIDVR

SEQ ID NO: 55897 - protein, 437 aa, Oryza sativa
MAAAADFRRPTPKFVAALSRTSSAFLFFSVVVVGLVSSARWITRFTLQASPPATAAIPAAVAATTRAGVPAAPPHPTYSISCSTPPRPPFNLSGGGGARTPQTSQTLALALSSSSSSCRSSPDPATASASVSASNSSSCPSYFRFIHEDLRPWRDAGGITRAMLARARVTASFRLLVLGGRAFVHRFRPAFQTRDLFTIWGVLQLLRRYPGRVPDLDLMFDCADWPVVRTHLYRGKHAAFMPPLFSYCGDDRTLDIVFPDWSFWGWPEINIKPWDALRQDLKDGNNRVKWLDRVPYAYWKGNPAVAVTRQELVNCNVSTTKDWNARIYKQDWFRESKAGYKDSNLGSQCTHRYKIYIEGSAWSVSQKYILACDSMTLLVTPRYYDFFSRSLMPIQHYWPVHNDNKCDSIKYAVDWGNSHKQLGYITCFCLIKYGPIL

SEQ ID NO: 55898 - protein, 248 aa, Oryza sativa
MGDKKLTKLKVRGANDVEVKSVLRQEFKESVDQDNFKVKVDGSSLKVDVPGTVDVGKLYERLKKMSSSVKIESVVPDDLMAKMDRYKKDLQNMKKQKEAVESKQIKQEEGYKLLQQEQRKWKRDKENLNSKLEKKTKETKDAKEELKITKREKEYLNTKLETKREENKRLDEENKKLQRKIKDLQEMQKGWITTTSTKLDSFESVDHNHHGMHHRVHKEVHRHEFHMHQEVRHHGNVMALENDGRRAH

SEQ ID NO: 55899 - protein, 231 aa, Oryza sativa; identical to SEQ ID NO: 31995

SEQ ID NO: 55900 - protein, 158 aa, Oryza sativa
MEVVTGAMGALLSKLGNLLKEEYKLHRNLREEITFLKSELESMEAALLKVSEAPIDQPPDRQVKIWARDVRDLSYDIEDSVDEFMVCIDSRTPNNSCSFGGFVYRSMDLLNRAKFRHKIGTDIKGIKSRIKEVNDRHDRYKVDGVLTKPIGPTVDSLV

SEQ ID NO: 55901 - protein, 661 aa, Oryza sativa; identical to SEQ ID NO: 54403

SEQ ID NO: 55902 - protein, 58 aa, Oryza sativa
MPKPQSGRRLSDIPAGDHGGGGGGGSSSGRRRRDGGRPPASPFPGRPPLPRQEEDIGQ

SEQ ID NO: 55903 - protein, 158 aa, Oryza sativa
MDTYKQRTEKPSKQRSAFSSKGNATINGGTISVNQKFLDSKVGIWENIIDMRTCLQNMLREYTLNEVVTEQDKSCLIEALKFHPRGYDKIGVGIREIKIGVNPGHPNSRCFIVQRSDDTSADFSYNKCVLGAANSISPELGSYIEKILSNRAIRPHQL

SEQ ID NO: 55904 - protein, 201 aa, Oryza sativa
MMSSWEEEMVWWQIRRGRTVTCLALSIRSALSLRGSRMSVSTQPMLWSYQGRTRSGDLAACCSATGWRTSRRPTPSTRRWTRRWRPACSRCAAAALTSWRRWTSTPPTRSTTTTTRTCWPTRASSPPTRASSPAPATPPSPPPRRWCRPTAPTASASPATSATPWSRWATSALSPALPARFARTAGPSTDEQKGKDFLHLP

SEQ ID NO: 55905 - protein, 296 aa, Oryza sativa
MLKSSLQVARISIALRSLRSTAALTAPISSLPRHGLRSLFHYNGAHQLSVPDNPYGRGYAGLGSLAEYRASYKAAAGLASATPPPAHMLNEGIAWQGIGILLDGLFGTGTGSTAAPDNDEPLGSTRIRSRQCIQISAGFMTVVFMLGKFGSLAAYIPFTIFADVYCVLFGLVAAVGLSFLQFSNMNSMHNLFILDVSIFLGLSVPEYFFRYSMAAQRGPAHTKAGWFNDYINTIFSSPPTVGLIVAVFLDNTLEVKNAAKDRGMPWWVPFRSFKGDARSEEFYSLPFNLNRFFPPS

SEQ ID NO: 55906 - protein, 185 aa, Oryza sativa
MAYVLISDLMYGDTDKRIKARVSRQWDYHDLNDETKIYHTDLVLLDEKGNSIHVQIYPPAMIKLRTLLQEGKVYYFDSFSVRYANRTYRPVTNPLMISFTKWTTLEECIDAFDDFPAITFSLTPFQDAPSLVDRNAFYVDIMGVITEIGATDTLRPKSRNTETLKRTMQIWDASNVRQASEHNFH

SEQ ID NO: 55907 - protein, 339 aa, Oryza sativa
MKFGAIYEEYLREQQDKYLTKCSHVEYKRLKKVLKKCRVGRSLQEDCPNGDQQEGNNESPDICKCNSCTLCDQMFFTELTKEASEIAGCFSSRVQRLLNLHVPSGFLRYIWRVRQCFIDDQQIMVQEGRMLLNYVTMNAIAIRKILKKYDKIHGSVSGRDFKSKMQTDHIELLQSPWLIELGAFHLNCNSSDIDETVGFLKNEFFKNFSCDLTEARPLMTMAISETMKYEYSLTCPICLGTLFNPYALSCGHLFCKGCACGAASVYIFQGVKSAPPEAKCPVCRSDGVFAHAVHMTELDLLIKTRSKDYWRQRLREERNEMVKQSKEYWDSQAMLSMGI

SEQ ID NO: 55908 - protein, 247 aa, Oryza sativa
MLEHSESATEKIMSSIMDTIAENLPKQKSGKFDVGAASDKMKEKLFGRQKTIHRVLGGGKPADVLLWRNKKISSSVLALATAIWVFFEWLDYHFLTIVSFALVLGMVVQFVWSNFSSALSGSPSKVPRVELPEELFVNIAVAVGTQVNKFLSFLQDVSCERNLKHFVLAIVGLWAAAVIGGWCNFLTVIYIGFVSAHTLPVLYEKYEDQVDDFLYNILGLLRDQYQKLDQGVLSKIPKGNMKFKKSE

SEQ ID NO: 55909 - protein, 296 aa, Oryza sativa
MLSWNNSWHSSSTENRTMEREIVASYEPKKNNEIRMFESSDEMATDLAEYISQVSEISIKERGYFAIALSGGPLISFMRKLCEAPYNKTLDWSKWYIFWADERAVAKNHVDSYYKSTKEDFLSKVPILNGHVYSINDNVTVEDAATDYEFVIRQLVKIRTVGVSESNDCPKFDLILLSIGSDGHVASLFPNHPALELKDDWVTYITDSPVPPPERITFTLPVINSASNIAVVATGEDKAKAVYFAISDGTEGPDAPSIPARMVQPTDGKLVWFLDKASASFLEAKTKNDGYEHPKY

SEQ ID NO: 55910 - protein, 247 aa, Oryza sativa; identical to SEQ ID NO: 55908

SEQ ID NO: 55911 - protein, 628 aa, Oryza sativa
MDSTSNKMKKMEPTSGGRHGTPGQVVGLCAALVTAMAASLLCSTSMALTPDGQALLELKLSFNGSSQRLTTWKPTDPNPCGWEGISCSFPDLRVQSINLPYMQLGGIISPNIGKLDKLQRIALHQNSLHGPIPSEIKNCTELRAIYLRANYLQGGIPSEIGELIHLTILDLSSNLLRGTIPASIGSLTHLRFLNLSTNFFSGEIPNVGVLGTFKSSSFVGNLELCGLPIQKACRGTLGFPAVLPHSDPLSSAGVSPINNNKTSHFLNGIVIGSMSTMALALIAVLGFLWICLLSRKKSIGGSYVKMDKQTIPDGAKLVTYQWNLPYSSGEIIRRLELLDEEDVVGCGGFGTVYKMVMDDGTAFAVKRIDLNREGRDRTFEKELEILGSIRHINLVNLRGYCRLPTAKLLIYDFLELGSLDCYLHGDAQDDQPLNWNARMKIALGSARGLAYLHHDCSPVIVHRDIKASNILLDRSLEPRVSDFGLARLLVDNDAHVTTVVAGTFGYLAPEYLQNGHATEKSDVYSFGVLLLELVTGKRPTDACFLKKGLNIVGWLNTLTGEHRLEEIIDENCGDVEVEAVEAILDIAAMCTDADPGQRPSMSAVLKMLEEEILSPCMSELYYEQHLEL

SEQ ID NO: 55912 - protein, 504 aa, Oryza sativa
MAARRANCALVLVLALALLAARDAGAAAVPKPNWLGGLSRAAFPKRFVFGTATSAYQVEGMAASGGRGPSIWDAFAHTPGNVAGNQNGDVATDQYHRYKEDVNLMKSLDFDAYRFSISWSRIFPDGEGRVNQEGVAYYNNLINYLLQRGITPYVNLYHYDLPLALEKKYGGWLNAKMADLFTEYADFCFKTFGNRVKHWFTFNEPRIVALLGYDQGTNPPKRCTKCAAGGNSATEPYIVAHNFLLSHAAAVARYRTKYQAAQQGKVGIVLDFNWYEALSNSTEDQAAAQRARDFHIGWYLDPLINGHYPQIMQDLVKDRLPKFTPEQARLVKGSADYIGINQYTASYMKGQQLMQQTPTSYSADWQVTYVFAKNGKPIGPQANSNWLYIVPWGMYGCVNYIKQKYGNPTVVITENGMDQPANLSRDQYLRDTTRVHFYRSYLTQLKKAIDEGANVAGYFAWSLLDNFEWLSGYTSKFGIVYVDFNTLERHPKASAYWFRDMLKH

SEQ ID NO: 55913 - protein, 411 aa, Oryza sativa
MNALAATSRNFRQAARLLGLDSKLQKSLLIPLREIKVECTIPKDDGTLATFVGFRVQHDNSRGPMKGGIRYHPEVDPDEVNALAQLMTWKTAVAAVPYGGAKGGIGCTPGELSRSELERLTRVFTQKIHDLIGINTDVPAPDMGTNAQTMAWILDEYSKFHGHSPAVVTGKPIDLGGSLGRDAATGRGVMYATEALLTEYSESISGSTFVIQGLGNVGSWAAKLIHQKGGKIVAVGDVTGAIRNKSGIDIPALLKHRSEGGSLEDFYGAEVMDAAELLVHECDVLVPCALGGVLNRENAAEVKARFIIEGANHPTDTEADEILAKKGVIVLPDIYANSGGVVVSYFEWVQNIQGFMWDEEKVNRELQKYMKNAFQNIKDMCKSQNCNLRMGAFTLGVNRVAKATLLRGWEA

SEQ ID NO: 55914 - protein, 719 aa, Oryza sativa
MSLVRSAPARQWAAWTRQEEQNFFNALRQVGKNFEKITLRVQSKSKDQVRHYYYRLVRRMKKLLGPEFSLDAKNSKDTIAAMLCWWSLLEKFSCSASKLHLKPRRFKTFVEALGNQLLKDRNKTRKKCPRGDVCLSSSSSAVNRTPGNESFSVKLLAVDVSNGSKVGSSKGSFFKKVTEPNCSNKSGATKGDLSATRTVKQKRRVGGVVASAAYKKWERAAMAGVSLVADAAEELERNTVNADARMLSPSSSNACTVDGLGTNHIKEADQQAPAKLKLQLFPINEATRKALEKDEHNPHLELTLSARKKISSVLEHLNRKWGNSNIASGELLLFPYCAHQEDLATYQRWTTKDTVAVADVFLSVNSPSVFRLRYGWFSLAELEAGVSEISLTHFENCLIPEDIHAKSPLEACVQKDGNSLSSCAPEQHPCGSKDQSALLFAMPSSTGKSAQVPEQCIDVLPSQFGRQNQDQVTTNQVFEVDQGMDCAAVSEGEWADTLTDISVGYLLTEASRGANTDCPGTSVVKNTLLLENPCSYDSFDAAVALHASRYKSAEQPALASHSTIWGAEETCDAFSFNLPASRKREGSNNSASSSPDSDSDVHPSNSEGFQCFLQDLAGAAVAHNPCIDDAKDVESLCAESPPRSDHDSAPKDQSLADLYWPDSLGPLDLDIPSATYHADDLLLGDSQNSWNRMMANSLDAFRNLSFFTADKNDSIPSIM

SEQ ID NO: 55915 - protein, 252 aa, Oryza sativa
MVREEKLDFVLVPLGLAVLAVYHLWLLYAVLRHPTRTVVGLNAIARKRWVTVMVAVEHGEERRAGRADAAEQHHGVDGACHDGHHARLRHQRLPRRHGGKVPGVPLVVVVGGAAAGIREQDRGGVRGQVPGHLALLHARLRLQRAGHPPVRARQLPPRPAARRRRGGGGGGGGGGGSAGGVRGVRGADGEQGEPLLVAGTPRLLRVAGALHVDVRAHPDAGVQRAHVRTALLPRHHQGARRRRGRDPPRSQG

SEQ ID NO: 55916 - protein, 64 aa, Oryza sativa; identical to SEQ ID NO: 43857

SEQ ID NO: 55917 - protein, 502 aa, Oryza sativa
MMDGRSILMGRYEVGKQLGQGTFAKVYYARNLTTGQAVAIKMINKDKVMKVGLMEQIKREISIMRLVKHPNVLQLFEVIASKSKIYFVLEYAKGGELFNKIAKEGKLSEDSARRYFHQLINAVDYCHSRGVYHRDLKPENLLLDENENLKVSDFGLSALAESKRQDGLLHTTCGTPAYVAPEVLSRKGYDGAKADVWSCGVILFVLVAGYLPFHDPNLIEMYRKICRADFRCPRYFSAELKDLIHKILDSDPSTRISIPRIKRSTWYRKPVEINAKNSEAATTNSISSGVATTSGSAECSTSEENQGSLSLPNLNAFDIISLSTGFNLSGFFEDTHGHQEERFTTRQPVTTVLGKLKELAKRLKLKVKKKDNGVLRLAAPKEGKKGFLELDAEIFEVTPSFLLVELKKTNGDTMEYRKLVKEDIRPALKDIVWVWQGDEHLNSQSILQGEQQQSPLPPELPQDQLQPSLPQQEKQDMPEPPLLPQVPQEEVQTSIPAEQTKN

SEQ ID NO: 55918 - protein, 1074 aa, Oryza sativa
MRGDAPAASSSSSASSPPSLFGGGDGGGELFGSAPGPLVFLPLLLIQGGGMDLSRVGEKLLSSVRSARSLGLLPPTPPPPASRPEVPARAAAAAAAARAIAGLPPHEKISLPSNSEDLVSIYGSNPQGHAVGELEEVFFQEEFDPIKYILQSIPAEGDSSYFDKQSTLRLAQLDKIAERLSHHVMGHHEEMVKGMQLVMELEQDLKVANVICMNGRRHVSSSKNEVSRDLVVNVKSKKKQALLDVLPILTELRNAQDMQMELESFVEKENYFQAFQLLPEYLQILENYSGLSSVQEMGRGIEAWLARTIQKLDTHLLGVCQTFHEESYLTVIDAYALMGDIGGMAEKMQSFFLQEVLSQTHYVLKEMLEEEVGNNTQRNRFTYSDLCAQVPEPKLRPCLLRTFQSLFSLMCSYYTIMSFCPGVKSIESEGENSLTGRNNTSQSADESLGDSGRGHAAEMSDRTSSSDVSNPDTSTSGTDSPFYQLRTDAAKLVAHAFERGRRNLWQLATSRLSVLLSSSVVFSTSTYQFLKNYEDLTIFILAGEAFCGFEASEFRQKLKGICLNYSVAFHRQNIYALKMVLERESWTIMSAEASRIISLAGLTGDGAALISPTSRISTLPIHGSTMSDTGKEKNGFAAWTKIENPFFYKVENGTTESPKSNMMFNSVDNSSAHGSTNNGNGNKAPLDEENEDLLADFIDEDSQLPSRLAKTKIVKGNSSHWKDGDISSQTGSSLSLLRMMDKYARLMQKLEIVNVELFKGICQLFGIFYHYIYETFGNQDRGQSGKSLPDHQSFRLRVALSKITQDSDQWIKPQSISYSPSSPVSMDVMPTAPPSSMFTLYGLKERCAAAETISLVARVLNRSRAHLHSVLSQSNTSILEEFFGTMVDSVPDLAEHIRRTSARMLLHINGYPDKIANAKWEVKELGMEHNGYVDLLLGEFKHYKTRLDHGGISKELQDLLLEYGIDSIAEVLVEGLSRVKRCTDEGRALMSLDLQVLINGLLHIVSANVRPKLQIVGTFIKAYYLPETEYVHWARSHPEYSKSQVVGLVNLVATMKGWKRKTRLETIERIEAGP

SEQ ID NO: 55919 - protein, 301 aa, Oryza sativa
MASFFADDGADELPRTASHPFDADDDAAPDASGGAAADDTGYGGYASFVDGGVEDVEEEEEEIAVESEGVPIGHVSGGFSPSPFSPDPELDGGDGPILPPPAQMGAEEGILLREWRRQNAIVLEEKERKEKELRAQILAEAEEFKKAFYEKRIQNCETNKVHNREREKIFVAGQEKFHAEADKQYWKSISELIPHEIATIEKRGKKDKDKKPSITVIQGPKPGKPTDLSRMRQILVKLKHAPPPHMMQPPPASAAKDGAKDGAKDGTPAPANGTKKPAESKEKPANGSPAEAEKEQPAASE

SEQ ID NO: 55920 - protein, 557 aa, Oryza sativa
MNDQKDKLWPMLQKLGVVMKADEKDLMGKALMKRVMQTWLPASNALLEMMIYHLPSPSKAQKYRVENLYEGPLDDVYATAIRNCDPEGPLMLYVSKMIPASDKGRFFAFGRVFSGRVATGMKVRIMGPNYVPGQKKDLYVKSVQRTVIWMGKKQESVEDVPCGNTVAMVGLDQFITKNATLTNEKEADACPIRAMKFSVSPVVRVAVQCKVASDLPKLVEGLKRLAKSDPMVLCTIEESGEHIIAGAGELHLEICLKDLQEDFMGGAEIIVSPPVVSFRETVLEKSCRTVMSKSPNKHNRLYMEARPLEEGLAEAIDDGRIGPRDDPKVRSKILSEEFGWDKGLAKKIWCFGPETTGPNMVVDMCKGVQYLNEIKDSVVAGFQWASKEGALAEENMRGICFEVCDVVLHADAIHRGGGQVIPTARRVIYASQLTAKPRLLEPVYLVEIQAPENALGGIYGVLNQKRGHVFEEMQRPGTPLYNIKANLPVIESFGFSSQLRAATSGQAFPQCVFDHWDMMTSDPLEVSSQANQLVLDIRKRKGLKEQMTPLSDFEDKL

SEQ ID NO: 55921 - protein, 771 aa, Oryza sativa
MEEDQRRKRNQIDDFISEPSVVEIDPRLPALYEEVERLVGIDGPREKIIKWIMTKGKPLEQRKVVSIVGLGGLGKTTLANEVYKTIQGDFKCITFVSISRTPNIRKILVDMLKGLGSNGDVSEDEQNLISHLRGFLKDKRYLIVFDDIWDIGAWKVVNCAFPENNLGSIIITTTRNTAVAEACSRTTSEGYLHSMQPLEEQDSQRLFYRRAFNSESCCPPHLEDISHAIISKCRSLPLAIISIASLLSIKPDTEDQWMQVHNSIGVTLNSDVEVRKILMLSYYDLPYPLKNCLLYLSMYPEDYVIDRQELIWRWIAEGFIIEAKGKTREQVGENYFNELINRSLIQPVYIQYDGRASCCRVHDIVLDLIISLSTGQNFVTIVHEQQHWSSFKKIRRTWFPSNGTDNRIVKEITNNCSHVRSLFFDSPKPEQIPQFKKCHALRVLVLDGCMSLESQHINSLTYLFQLKYLKLNVANVTEMPKDIGRLQQLETLIIRGGGHVNEINIPSSVCRLQKLERLIVDYPMRLPDEIGFLQALEMLSLFYNIEYSIKCLQELRRLTRLRYLRIRTPFGGDVARFERYKDAFYMTLDELGKNSLQSLHVHVTTKFSDTLMDSCCSSAPGLRELSTSGVGISKLSEQMISLSNLAYLVIFYNTRSNDQKDINLLGCIPKLLYLKVIFAQGWEDGLTVGCGGFPCLKELMFRHSRLHWLLFEPGAMPKLQRLSIELFAQKAASKLGFEQSFVHLSSLQHLIVVLDCSDAHYKGRESFGRCH

SEQ ID NO: 55922 - protein, 494 aa, Oryza sativa
MGKEGKRREEEGRRRRKGKGKGAGEMVLQQEEEDAAPAMGCWIRIPRRLGGGCMSSRSKVDSSTTTSGGGGGGSARVGGESKSANDGCRDHSVQPMASGSTTSSNTGSISPSSIVGEELKLAFQLRRFTFNELKCATRNFRPESLLGEGGFGCVFKGWIEENGTAPVKPGTGLTVAVKTLNHDGLQGHKEWVAEVDFLGNLQHPHLVKLVGYCIEDDQRLLVYEFMPRGSLENHLFRRSLPLPWAIRMRIALGAAKGLAFLHEEAERPVIYRDFKTSNILLDADYNAKLSDFGLAKDGPEGDKTHVSTRVMGTYGYAAPEYVMTGHLTSKSDVYSFGVVLLEMMSGRRSMDKNRPNGEHNLVEWARPYLGERRRFYRLVDPRLEGNFSIRGAQKTAQLACACLNRDPKARPLMSQVVEVLKPLLNLKDMASSSYFFQSMQQERAASLGNPIGSQSMKAQGTFARNGQQPMRSLSYGPHASPYRQSPRPNNGKLQ

SEQ ID NO: 55923 - protein, 624 aa, Oryza sativa
MAAHRWAVWAVLLLRLLVPAARVLANMEGDALHSLRTNLVDPNNVLQSWDPTLVNPCTWFHVTCNNDNSVIRVDLGNAALSGTLVPQLGQLKNLQYLELYSNNISGTIPSELGNLTNLVSLDLYLNNFTGPIPDSLGNLLKLRFLRLNNNSLSGSIPKSLTAITALQVLDLSNNNLSGEVPSTGSFSLFTPISFANNPSLCGPGTTKPCPGAPPFSPPPPYNPPTPVQSPGSSSSTGAIAGGVAAGAALLFAIPAIGFAWYRRRKPQEHFFDVPAEEDPEVHLGQLKRFSLRELQVATDTFSNKNILGRGGFGKVYKGRLADGSLVAVKRLKEERTPGGELQFQTEVEMISMAVHRNLLRLRGFCMTPTERLLVYPYMANGSVASRLRERPPSEPPLDWRTRRRIALGSARGLSYLHDHCDPKIIHRDVKAANILLDEDFEAVVGDFGLAKLMDYKDTHVTTAVRGTIGHIAPEYLSTGKSSEKTDVFGYGIMLLELITGQRAFDLARLANDDDVMLLDWVKGLLKEKRLEMLVDPDLQSNYIDVEVESLIQVALLCTQGSPTERPKMAEVVRMLEGDGLAERWEEWQKIEVVRQEVELGPHRNSEWIVDSTDNLHAVELSGPR

SEQ ID NO: 55924 - protein, 300 aa, Oryza sativa
MGAPKQRWTAEEEAALKAGVAKHGTGKWRTILRDPEFTALLRLRSNVDLKDKWRNLSVTAGGYGSRERARVALKGGKRGPKALAEPMDADEKNPDIDDNAIIDAQPLAVVVEPMQLESTPEKEKSVARLDDLILEAIKKLKEPSGSNRTTISSYIEEQYWPPEDFQRLLSTKLKALVATGKLIKVNQKYRIAPSSNSSGGKSIKVYSTGEMNIENNNVRQLSKPQVDAELDKMRSMSKEEAASFAARAVAEAEAAIAEAEEAARAAEAAEAEADAAKAFLDAVVTTMQNRNHASAMLRAC

SEQ ID NO: 55925 - protein, 604 aa, Oryza sativa
MSAMRRRPVLPTHQDDMEKVGGKPPQSRLCFLATLCAMFWVLIFYFHFFVIANEPGSAGADTAAGAAASIARAELPLPEPERVSDPAVPLPPPALVSEPPPTTATVAKVEDEEKPTAVAHQEAAPRDYAFQRALKTAENKSDPCGGRYIYVHELPPRFNDDMLRECERLSLWTNMCKFMSNEGLGPPLGNEEGVFSNTGWYATNQFMVDVIFRNRMKQYECLTKDSSIAAAVFVPFYAGFDVARYLWGHNISTRDAASLDLIDWLRKRPEWNVMGGRDHFLVGGRIAWDFRRLTDEESDWGNKLLFMPAAKNMSMLVVESSPWNANDFAIPYPTYFHPAKDADVLLWQDRMRSLERPWLFSFAGAPRPDDPKSIRSQLIDQCRTSSVCKLLECDLGESKCHSPSAIMNMFQNSLFCLQPQGDSYTRRSAFDSMLAGCIPVFFHPGSAYVQYTWHLPKNYTRYSVFIPEDGVRKGNVSIEDRLKSIHPDMVRKMREEVISLIPRVIYADPRSKLETLKDAFDVSVEAIINKVTQLRRDIIEDHEDKDFVEENSWKYDLLEEGQRTIGPHEWDPFFSKPKDKGGDSTNPSTNAAKNSWKNEQRGQN

SEQ ID NO: 55926 - protein, 302 aa, Oryza sativa
MAVVETSADHAAPPPPEGDAGEREMRDLEDLLSKLNPMAEEFVPPSLAAASPTAYAYYPTPTPSHVFPAVDGLAGPRPRKKGGGGGGGGGFGGQGHAGKRRMNSRTSMAQRDEVIRRTVYVSDIDHQVTEEQLAALFINCGQVVDCRMCGDPNSVLRFAFIEFTDEESARAALNLSGTVLGYYPVRVLPSKTAIAPVNPTFLPRSDDEREMCARTIYCTNIDKKVSQADVKLFFESICGEVYRLRLLGDYHHSTRIAFVEFVMAESATAALNCSGVILGSLPIRVSPSKTPVRPRAPRQLMH

SEQ ID NO: 55927 - protein, 312 aa, Oryza sativa
MAAAGKEPSRVLVIGGTGYIGRYIVAASAREDHLTSVLVRDPAPADPAKAAVLQGFRDSGATLVKGDLYGHQSLVAAIKSADVVISAVGYAQLADQTRIISAIKEAGNVKRFFPSEYGNDVDHVHAVEPVKSVYATKARIRRVIEAEGIPYTYVSSNFFAGRFLPSLAQAWIKGLPTDKVIILGDGNVKGVFATEEDVGTYTIKAVDDPRTLNKILYLRPSSNILSHNELVSLWEKKVGKTFDRVYIPEDEVLKKIQESPAPLNVVLSINHSVWVKGDHTNFEIEPSFGVEATELYPDVKYTTVDEYLNRFL

SEQ ID NO: 55928 - protein, 827 aa, Oryza sativa
MAASAVAVAFVVAVAAVLAAAASAAVTYDRKAVVVNGQRRILISGSIHYPRSTPEMWPDLIEKAKDGGLDVVQTYVFWNGHEPSPGQYYFEGRYDLVHFIKLVKQAGLYVNLRIGPYVCAEWNFGGFPVWLKYVPGISFRTDNEPFKAEMQKFTTKIVEMMKSEGLFEWQGGPIILSQIENEFGPLEWDQGEPAKAYASWAANMAVALNTSVPWIMCKEDDAPDPIINTCNGFYCDWFSPNKPHKPTMWTEAWTAWYTGFGIPVPHRPVEDLAYGVAKFIQKGGSFVNYYMYHGGTNFGRTAGGPFIATSYDYDAPIDEYGLLREPKWGHLKQLHKAIKLCEPALVAGDPIVTSLGNAQKSSVFRSSTGACAAFLENKDKVSYARVAFNGMHYDLPPWSISILPDCKTTVFNTARVGSQISQMKMEWAGGFAWQSYNEEINSFGEDPLTTVGLLEQINVTRDNTDYLWYTTYVDVAQDEQFLSNGENLKLTVMSAGHALHIFINGQLKGTVYGSVDDPKLTYTGNVKLWAGSNTISCLSIAVGLPNVGEHFETWNAGILGPVTLDGLNEGRRDLTWQKWTYQVGLKGESMSLHSLSGSSTVEWGEPVQKQPLTWYKAFFNAPDGDEPLALDMSSMGKGQIWINGQGIGRYWPGYKASGNCGTCDYRGEYDETKCQTNCGDSSQRWYHVPRSWLSPTGNLLVIFEEWGGDPTGISMVKRSIGSVCADVSEWQPSMKNWHTKDYEKAKVHLQCDNGQKITEIKFASFGTPQGSCGSYTEGGCHAHKSYDIFWKNCVGQERCGVSVVPEIFGGDPCPGTMKRAVVEAICG

SEQ ID NO: 55929 - protein, 336 aa, Oryza sativa
MNGASSGGGGGAGAGGDGPLVYQRWKGNNVFVLQGRFIFGPDARSLYVTMFLIIAPASIFCLFVAKELMNNFSYGLGLPVMISAVVFTAYDLSLLLLTSGRDPGIIPRNAHPPEPEGLDGNAEVGSNQTPPMRLPRVKDVVVNGITVKTKYCDTCMLYRPPRCSHCSICNNCVERFDHHCPWVGQCIGLRNYRFFYMFVFSTTLLCLYVFGFCWVYIVKIRSSEQITIWKAMAKTPASIALLVYTFIAVWFVGGLSVFHLYLMSTNQTTYENFRYRYDQRANPYNKGVMEDIKEYSSLQFLPPRQLPRQSPSSTGARSEASLNQWFHESTHGESRR

SEQ ID NO: 55930 - protein, 518 aa, Oryza sativa
MAGGAVVSTGAGKDYPGKLTLFVFFTCVVAATGGLIFGYDIGISGGVTSMDPFLRKFFPEVYRKKQMADKNNQYCKYDNQLLQTFTSSLYLAALVSSFFAATVTRVLGRKWSMFAGGLTFLIGAALNGAAENVAMLIVGRILLGVGVGFANQSVPVYLSEMAPARLRGMLNIGFQLMITIGILAAELINYGTAKIKAGWGWRVSLALAAVPAAIITLGSLFLPDTPNSLIDRGHPEAAERMLRRIRGSDVDVSEEYADLVAASEESKLVQHPWRNILRRKYRAQLTMAICIPFFQQLTGINVIMFYAPVLFDTLGFKSDASLMSAVITGLVNVFATLVSIFTVDRLGRRKLFLQGGAQMVVCQVVVGTLIAVKFGTSGIGDIPKGYAAVVVLFICMYVAGFAWSWGPLGWLVPSEIFPLEIRPAGQSINVSVNMLFTFVIAQAFLTMLCHMKFGLFYFFAGWVVIMTVFIALFLPETKNVPIEEMVLVWKSHWFWRRFIGDHDVHVGANHVSNNKLQP

SEQ ID NO: 55931 - protein, 206 aa, Oryza sativa; identical to SEQ ID NO: 35124

SEQ ID NO: 55932 - protein, 132 aa, Oryza sativa
MEVSFVGPGGKPPFFYVVMTGRMTSSRYLAGACCHGIVNVVESCPTEEVSSESSETSPSLPHLHQPNTSLGDGDCRTALGAMVLPSSESPCQSSDRHHPVESLVMTLLVAVISSPTSAGHLRWCYHLPHTRR

SEQ ID NO: 55933 - protein, 237 aa, Oryza sativa
MGLMMLLWRIWYVRNGITHGKAAIPVEVSQRFIISYMASLLEIRQHPNANLIKGKHVVQYGSSMPLPRQCKPSAESSSWIRPQEGWMKLNVDGSYYPSDGKGGTGAVLRDSSGNLIFAACGVLHRPASALEAEMVDCREGISMALQWTLLPIIVETDCLEMVQLIHSDEKAMSDLAFLIREVKLLLKGNREIVIKKVSRGQSRDCHVLANKGRCESLTAFWPDDNCNFIPHVLGADE

SEQ ID NO: 55934 - protein, 59 aa, Oryza sativa
MNYDPICYPISTSTREQLNPSHSSTKAQPRPILATYPLNQIDYSVYLLLSKKPKPTQEI

SEQ ID NO: 55935 - protein, 509 aa, Oryza sativa
MIKQILGRLPRKPGKAGDSRDAAGPNGNEPSNSYSVARSVEQGNKRSGNGDYVVPAGLTPNPMMNGTVVYHSNEPLPAFKDVPASEKQNLFVKKVNLCCAVYDFADPTKNLKEKETKRQTLMELVDYVTSANGKFSEVVMSEITKMVSINLFRSSSPTPRENKAIEGVDLEEEEPLMDPAWSHLQIVYEVFLRFVASQETDAKLAKRYIDHSFILRLLDLFDSEDPRERDYLKTILHRIYGKFMVHRPFIRKAINNIFYRFIFETEKHNGVAELLEILGSIINGFALPLKEEHKLFLVRALIPLHKPKCVSMYHQQLSYCITQFVEKDCKLADTVIRGLLKYWPVTNSSKEVMFLGELEEVLEATQPAEFQRCMVPLFRQIACSMNSSHFQVAERALFLWNNDHIENLIKQNYKVILPIIFPALERNARGHWNQAVRSLTLNVRKIFSDHDSAFFGECTQKFNDDELKQEESNSKREALWKRLEEAAVPRSDNNNPVGTPNGKFSQAAG

SEQ ID NO: 55936 - protein, 199 aa, Oryza sativa
MDPASEELEQRSRYLSSLIRRTKLHAAPALAPPPPTPPPEPETKLQLEMEPQPERVEEAAKKPAAVAAVVEKREVKGGGGGGGQAGKGKGKEKEMEKGKEERKVSVRVRAADMPLAMQRRAVRLAFDAVAAMPRLDSKRLALALKKEFDATYGPAWHCIVGTGFGSYVTHSVGGFLYFSVDKVYVLLFRTAVEPLGHPQ

SEQ ID NO: 55937 - protein, 317 aa, Oryza sativa
MGKASKDKRDIYYRKAKEEGWRARSAFKLLQIDQEFNIFHGVKRVVDLCAAPGSWSQVLSRNLYVPAKQSPDCKEGDLPLIVAIDLQPMAPIEGVIQVQGDITNARTAEVVIRHFDGCKADLVVCDGAPDVTGLHDMDEFVQSQLILAALTIVTHVLKVGGKFVAKIFRGKDTSLLYCQLKLFFSQVTFAKPKSSRNSSIEAFAVCENYSPPEGFKEKDLYHLLEKVGTPSGADDLDCRSGWLEGPNKVYIPFLACGDLSGYDSDRSYPLTSTEGGSYQSLDPVQPPIAPPYKTALEMKKVASHGIGADISKLSLDS

SEQ ID NO: 55938 - protein, 271 aa, Oryza sativa
MKWAFYFAPGWGSFPPGCADVEPRRCRRTDGKKWRCSRDAVGDQKYCERHINRGRHRSRKHVEGRKATLTIAEPSTVIAAGVSSRGHTVARQKQVKGSAATVSDPFSRQSNRKFLEKQNVVDQLSPMDSFDFSSTQSSPNYDNVALSPLKLHHDHDESYIGHGAGSSSEKGSMMYESRLTVSKETLDDGPLGEVFKRKNCQSASTEILTEKWTENPNLHCPSGILQMATKFNSISSGNTVNSGGTAVENLITDNGYLTARMMNPHIVPTLL

SEQ ID NO: 55939 - protein, 151 aa, Oryza sativa
MTKTTAARRRWLSGHSCFPFSFVSRFPLPEILRRLLMVSWSLWPAAAFPSSSRSRSRCLPLKLAEPAVAAAVRSQWLLSSSSQRASGGCCPLLASSMSTVAAISSLSPSHENLVLQDLFRIERLQARGNQQAYMTGGNLYLIFLWCMVNQV

SEQ ID NO: 55940 - protein, 395 aa, Oryza sativa
MVRETGYYDVLGVSPTATEVEIKKAYYMKARKVHPDKNPNDPLAAAKFQELGEAYQVLSDPTQRQAYDSYGNSGISTEAIIDPAAIFAMLFGSELFEDYIGQLAMASMASLDIFGDEEEIDARMLQEKMRVVQKEREEKLAETLKNKLHLYVQGNKEEFVQFAEAEVSRLSNAAYGVDMLSTIGYVYSRQAAKELGKKAIYLGVPFIAEWFRNKGHYIKSQVTAATGAIALMQLQEDLKKHPSAECHYTEEELEAYMETHKSVMVDSLWKLNVADIEGTLSHVCQMVLQDSTIRREELRARAKGLKTLGKIFQRVKLGSSEGEVTTINNTINNSDDNDGSSPDSSPMSPREHPYDPNPPYYQSPYVEAPQFVGGYPSLNFPMPTAPPGAQRDPIP

SEQ ID NO: 55941 - protein, 265 aa, Oryza sativa
MGIGASDELLGTFVPIAVYWLYSGLYLALDGVERLDVYRLHPREEEAAKNVVSRGTVVRGVLVQQAFQVAVSLTLFAVIGDESDIEQKQPSALVILLQFAIAMFVMDTWQYFMHRYMHINKFLYKHIHSKHHTLVVPYSFGALYNHPLEGLILDTIGGALSFLVSGMTPRTSIFFFSFATIKTVDDHCGLWLPGNILHALFNNNSAYHDIHHQLYGNKYNFSQPFFVIWDKILGTYMPYSIEHRKGGGFESRPVKLNIAEQTKTD

SEQ ID NO: 55942 - protein, 157 aa, Oryza sativa; identical to SEQ ID NO: 46516

SEQ ID NO: 55943 - protein, 642 aa, Oryza sativa
MAISDARVVRHVRCPKCFSVLQEPTGAPVYQCGGCGTTLRAKNRTGNSQEVISAPSSLGSGLPPHSKHLGSSDVASTSGSTPEAQISSGQQGADMTSRRETDDLVSARNNAPEPERVVPAEKEEEHVQSTSQQAVGNSEDLTRGDAATAADAQCSDRASEGKVQFSESREDSNTELQDVQRSDQTESDAEGKKSSEETSQSPRRDVVELPPSSVQTPDSQPAPAVLKREDDPATSPPHGHARRSPESLAPLQKRILKTVDNLKDDLSELFSKSPELNKPRTHARPPRLPRQEGYAPRDAAMAAAASIQAIRARHAAVHRPGYIARAGKPGQLAAPPPPRGLPSRRYRRCRADHPCCHDARHGPSCHHGCCPPHHGKQACTSCRGQHCCRPRTQESPAPRRPAAAAAKEVVKRRAPPRNHCRPVLKGAPFIICSSCFKLVQVPADFAVSTKTVRKLRCGSCSAVLSYSYRDPDRKKHGDQYSADGSPAAPRGHGRRGDKFAFLDDFGHVDVSYSTEDEQPLHVSRNSSFNTVDEMAAAATQQHGSSLHRLMGYGSASDLLFRQHSPDLYESFSERTTPEAAALYDRKGKGVCVDLDDDGGDDDSDEDCSGALKRSRLRGSGWPLPGILNSKGTTGMGAIRIKS

SEQ ID NO: 55944 - protein, 1343 aa, Oryza sativa
MAELTAGAVSSLLGLIRNAELMMSGRAKEDMQFIKDEMDSINGTLMYLTENKASHNDQVRVWMRQVRDIAYVADDCITLYRRDLTPPEPGFWPWLRHVPTWLSTVPTRHRLAKKIHELKDRVRDVGERRQRYGVVGEIPTKNAASSSGHGSQTAPSSDAAAATAAADARADEEDDDQNHAATATVVDGRPDRRRALEPRTLEDYCCENLHKWLKEFNTKRGSMVPFIAVEAPRPEDAAAVSSIVSYVAAEAAGFNPAVWVNLPLLHAEFDLPLEPWEILCYILGELKPRSQPVQAQGSRDKRKQKQEEGGKDDKAMGSDDDDDNLQSQASDEKWQVFDEMWEEIEKRNFDDRIEQLKTKIDSIKDKKTTNEIEKTVRSQEKVNLNALVYNKPLGILFLALLPPMPNDVKSVRRALRTLASGEANIIRKIAEALKIHMEVSEVNKIHLSKKQYVNILREVFPTVSSTPLKQDKSTTKSTALGPSAAATMLGKDQIKEIVHKAILDKQLEKHLEVADAIEETKNKIGDIKEKIKVQLVIQGIVDKIKDHLEKDKRTLIILQDDKGFLSSCEETTMNALSLLGYTCADAMVVVITKESQVANKFCYPPREPITYSIAGLYHDTVLQLTSQQAKQNNNYNSQLFRDILDKCDPDEFCMKMFAHALYAEPNRSNNDLRELYKTLVPQKSLASNASKASPEPDKSNDSTQLVSEESSLCNNAKKIFEFSYNDMPTEYLSCLLYLAIFPQGQSIRRSTLQARWVVEGLITGKDDWPSADCAVRNAERCFDVLIDRWLVYPGDVTAAGKVKSCMVDNLVHEFITKAAKEKQFVKESQLHHLAHHFSIFCNLRLRRSDNIEKFMQNLKYFSPYLQLLKVLDLEGCQSFDKNNHYLEDICNKVLLLKYLSLKDTNVAHLPNAINNLHELEVLDIRQAKVPEIDTNSIMLFNLKRLLAGQVYPSPRYNSTGMYLKRHEETISSSVRIPRKIEKMVKMEVMYSVNVSRDGNMLTEIGKLRQLRKLGVVIDDHDGHLRKLLQVISDLSGSLRSLSITLIGTGSEQAPSSEETSADCLKQHPKLLESLSISGVIDKVQLLPLLAIGQGNRNLAKVTISGTMLKQEDLKKDIAKLHNLCCFRLRHRSYDDEKITFEENEFLELKYLIIEGTNMMSIIFKQGAAPKIEKIILSFTSTTHIAGIVDLPNLKELELKGNNNDRKLVACLAGAPHLSRLTLDGTLLDLNELKILAELPSLRSLILLQQSCVRSSLNFNNGEFSKLNLLVVNCSNITSISFTDEGAAPKLEKITWSFTTKMLSLSGICYLPQLKELELNGKIIPDQVIQDIKEHKNKPIFNHQ

SEQ ID NO: 55945 - protein, 188 aa, Oryza sativa; identical to SEQ ID NO: 35168

SEQ ID NO: 55946 - protein, 130 aa, Oryza sativa
MAHPPRRRHTAVALTHVEGDTSAHTAGSPPRTTERGRGVRARRPPLAPHFTPLSLPRLLFFPLFSCSRRLFSSVVVGPSMVVRPQSSAIVATSIQSIISTVCELELEMRCFPISCESFGPCESQLPKCPG

SEQ ID NO: 55947 - protein, 205 aa, Oryza sativa
MEASSKSKNSREENLPINDADTPDDGPTDIYTKKKGKGKHSKQQIKSPEEPAGQSTRPDVTIAAPAKSELLDGKEMKKEKAAVEHVKNKKSKRKDDNSSVDHTDKKVSKGAKRTKSAKKEEKNADGIDDAEMPFADLVFSGEGNNPELELKGKNQEIARDGKFGGLVIDHTKKKKKAKGTVFGSSALEQLSSVPEVGSGALSGWD

SEQ ID NO: 55948 - protein, 260 aa, Oryza sativa; identical to SEQ ID NO: 33308

SEQ ID NO: 55949 - protein, 697 aa, Oryza sativa
MNVLVQQSNLEALLQRHVKMAAEIKNLDTDLQMLVYENYNKFISATDTIKRMKTNIVGMEANMEQLLSKITSVQSRSDTVNTSLFDKRENIEKLHRTRNLLRKVQFIYDLPTRLNKCIKTEAYADAVRFFTGAKPIFEAYGDTSFHDCKKASEEAIDLVTQHLKTKLYSDSEPIESRAEAVVLLKQLNFPVDSLKSNLLEKLEDCLLNFQKEPTQASIGDISKTFRAYLIIFPDSEKRLIELAQALFSNRYETVRENLRKRIPSTYLLAMLRSLWEDATAIDEVIPEAALPAFSLETTRDIIRQHIATAFLHLQSEISDVLARTPSTSNGKLEESQLQTAMETSKVKVLQGCIDLLQEFHHLIDGNTELLVKLRDLVIDWVQEGFQDFFQKLDGHFHMLSGRSKSPSQEMESVQIDKVPTALVLMLAQLCVFIEQTAIPKVTEELASSFSGGGARSYEYGPPFVPGEICRLYRSSGEKFLHHYINMKTQKISKLLNKRFTTPVWIKHKEPREVNMFVDLLLLEFNGVVSEVKQVLPGLIRRHRHSDSTGSTTSSRSNPMREDMLNRSNTHRARSQFLENHLAKLFEQKMEIFTKVEYTQESVISAVLKLCLKSLQEFVRLQTFNRSGFQQIQLDMEFLKTSLKEFVDDEAAISFLLKEVNNAAHERCLDPIPLEPPILDKLISAKLAKIKEQSPNMQ

SEQ ID NO: 55950 - protein, 264 aa, Oryza sativa
MKSTDFQPNGQAPISSTDKQITPDDSGMVYSKPRRLRTDEIPQIIDDFRRAARNAIEAGFDGVEIHGAHGYLLEQFMKDSANDRTDEYGGSLENRCRFAVEVIDAVVAEVGAHRVGIRLSPFVDFMDCFDSDPVALGSYMVQQLNKHPGFLYCHMVEPRMAIIEGRRKIAHGLLPFRKQFNGTFIAAGGYDREEGNKVVADGYADLVAYGRLFLANPDLPRRFELDAPLNRYDRSTFYTQDPVVGYTDYPFLEEIDEESRTTYA

SEQ ID NO: 55951 - protein, 814 aa, Oryza sativa
MDLSATPSRSKSGLRSSPRKPVAAPAVAQMDLSTPSKPTPRRKPKAPPVAAPMSPVTPSSVRRSSRLLETPTKVTSETPVKPTPTPKRKRAAPSPSPKTPTQSEPKRQRQRQRQRQQPKKPKKRAYYRKVVYDGGEFAAGDDVYVKRRDGAESDAEDPEAEECRVCFRAGAAVMVECDVCLGGFHLRCVRPPLRRVPEGDWACPYCEAERAGKAIERPKPPEGKRIVRTAKEKLLSSDLWAARIESLWREPDGIFWAKVRWYIIPEETAAGRQPHNLRRELYRTNDLADIEMETILRHCYVMSPKEFKDASDQGDDVFYCEYEYDIHWHNFKRLADIDDEPETKEDPGDEPYNAGNDYVSDSDEDSEYDEEEEPTKCSSARTHQSHALAANLRKGRTYGLQKIGIRKIPEHVRCHQKTNLEKAKATLLLATLPKSLPCRDKEMEEISAFVKDAICNDQCLGRCLYIHGVPGTGKTMSVLAVMRRLRSELDSGNLRPYSFIEINGLKLASPENIYKVIYEQLSGHRVGWKKALHYLTEHFSGGTKIGKQANQPIILLIDELDLLLTRNQSVLYNILDWPTRPNSNLVVIGIANTMDLPEKLLPRISSRMGIQRLCFGPYNYRQLQEIITSRLKGIDAFEDQAIEFASRKVAAMSGDARRALEICRRAAEFADYRVKQSGHTSVNRGKNVVCMGDIEAAIQEVFQAPHIQVMKNCPKFGKIILVAMVHELYRSGLGEVMFDKLAATVLSWCHVNRELLPGYDTLLKICCKLGEGKIILCEEGTKHKLQKLQLNYPSDDVTFALKESPDIPWLSKYL

SEQ ID NO: 55952 - protein, 308 aa, Oryza sativa
MAEKEVGRIFVGGLSWDTTERTLERAFSEYGKVIETQVVLERDTGRSRGFGFVTFSEPRAVDAAIRGMHNGELDGRTISVNKAQPRMNTDDGYGYGGGGGGGGTYSSGARGGYRGGGDAVPSANDDCFKCGRAGHWARECPYSSGGGGGRTGRYSPPSRYGSGTGGGRGDRFGGSDRFANRYVDDRYDGGRYVDDRYGGGGRDRYATDRYPPTADRFTGDRYGGSDRYASSGFTRERSYERDGGRSGGSYYRDEPRGSGGYDRGGMRMGSGDRYGTGGPARFAGSYRDRPAPYDRPSRAAARTYDDRC

SEQ ID NO: 55953 - protein, 131 aa, Oryza sativa
MVGAQLILTAHCSTERTVRARLDGFKSRLRAKDDELGRKNLEMEALANTLKEAKAENKRLQSEREKGKEARAEVDLLKAELEKEKAHSAVLIDYYNLTEPKMEALRQEVRKAEASATEESRRFSREMVKTT

SEQ ID NO: 55954 - protein, 148 aa, Oryza sativa
MDMLASQSYKSISHLLQLACNTKSQIEEDMEKQHAMFLPPFTNHLLEVHNHEKEERDMIEPSFPLFTLKFDAPPSSEEITKGKLDDAKTNQGECVVNKLNLSTFHAIVGQPLMKPIVEITLSQVDFFLLFLVIKKSCVILLHLYSFHN

SEQ ID NO: 55955 - protein, 398 aa, Oryza sativa; identical to SEQ ID NO: 48386

SEQ ID NO: 55956 - protein, 634 aa, Oryza sativa
MGYKIFEGSLVLLSLLLFTSLAVADIASEKQALLAFASAVYRGNKLNWDVNISLCSWHGVTCSPDRSRISALRVPAAGLIGAIPPNTLGRLVSLQVLSLRSNRLIGSIPSDITSLPSLQSIFLQDNELSGDLPSFFSPTLNTIDLSYNSFAGQIPASLQNLTQLSTLNLSKNSLSGPIPDLKLPSLRQLNLSNNELNGSIPPFLQIFSNSSFLGNPGLCGPPLAECSLPSPTSSPESSLPPPSALPHRGKKVGTGSIIAAAVGGFAVFLLAAAIFVVCFSKRKEKKDDGLDNNGKGTDNARIEKRKEQVSSGVQMAEKNKLVFLDGCSYNFDLEDLLRASAEVLGKGSYGTAYKAILEDGTIVVVKRLKDVVAGKKEFEQQMEQIGRVGKHANLVPLRAYYYSKDEKLVVYEYVATGSFSAMLHGIKGIAEKTPLDWNTRMKIILGTARGIAHIHAEGGSKLAHGNIKATNVLLDQDHNPYVSDYGLSALMSFPISTSRVVVGYRAPETFESRKFTHKSDVYSFGVLLMEMLTGKAPLQSQGQDDVVDLPRWVHSVVREEWTAEVFDVELMKYLNIEDELVQMLQLAMACTSRSPERRPTMAEVIRMIEELRQSASESRDSSNENARESNPPSA

SEQ ID NO: 55957 - protein, 619 aa, Oryza sativa
MVKIVTYNVNGLRPRVAQHGSLRRLLDALDADIICFQETKLSRQDLSGDVIMAEGYEAFISCNRSSKGRGAYSGVATFCRVTSAFSSQEVALPVAAEEGFTGLQETAKNSETIGDFVLVTPVEEEGLGEVTKEELLKVDNEGRCVITDHGHFVLFNIYGPAVEEDDIERVRFKLLFYKILQRRWEHLLALGKRVFVVGDLNIAPSSIDRCDAQPGFEKQTFRKWLRSMLREHGGPFFDAFRSKHPERVGAYTCFNQKVGAEVYNYGSRIDHILISGACFHHCGSVDDHSIFPCHVEECEIMDHFRRGNSENMSMWKGGRSSKLEGSDHIPVYIVLNEIPELPVHNTPSSAARYLPEIRGRQQSIVSFLRKGMIYEHKDAMSMDRADESCCGGGLERKAIYKEEPPTDIAKFSKGNDLHSVIKRKIRDQLLNEGSSGNSHNSTAALLATQSRKASFSCSKAVSNKKNKHNLSSQPTIKSFFQQPKSKPGDSSTNSIVTPPDTLHGMDELHDPKNDCLPESIQCTTPATEDQGNSDVPCSLSTDKCNEATLEWQRIQQRMKMTLPLCKGHHEPCIPRSVKKGSNIGRLFYVCARAQGPASNQEANCGHFQWATVKSKEKRR

SEQ ID NO: 55958 - protein, 167 aa, Oryza sativa
MAGEAAAAERWVGAAVDFSEGSRAALRWAADNLLRAGDHLILLHVPKDPDYEQGETLLWEATGSPLIPLSDFSEPTIAKKYGAKPDAETLDMLNTVARQKEVVVVFKVLWGDPREKLCQAINEIPMSCLVIGSRGLGKLKRVLLGSVSDYVVNNATCPVTVVKTADG

SEQ ID NO: 55959 - protein, 215 aa, Oryza sativa
MYADQISTGRKRSIHDRIDGDQPAARAGAGAGGRGARNPPSKRQRQTDEKWKHDLYREDDEPASKSIDPRDLRLKLQKKSSQQSFAGQRGSGVRDLREMLSGTMHPQPVNADPPKAKPSSEIVKVTRRENADVMPVRQSKKVPKPTSSKKTSQPKADSPLDIFLKSLGLEKYSITFQAEEVDMAALRHMTDSDLKALGIPMGPRKKIMLALESRA

SEQ ID NO: 55960 - protein, 954 aa, Oryza sativa
MGVSRPPSTPASKIERTPMSTPTPGGSTRVKEEKIFVTVRVRPLSKKELALKDQVAWECDDNQTILYKGPPQDRAAPTSYTFDKVFGPASQTEVVYEEGAKDVAMSALTGINATIFAYGQTSSGKTFTMRGVTESAVNDIYRHIENTPERDFIIKISAMEIYNEIVKDLLRPESTNLRLLDDPEKGTIVEKLEEEIAKDSQHLRHLISICEEQRQVGETALNDTSSRSHQIIRLTVESRLREVSGCVKSFVANLNFVDLAGSERAAQTHAVGARLKEGCHINRSLLTLTTVIRKLSSDKRSGHIPYRDSKLTRILQLSLGGNARTAIICTMSPAQTHVEQSRNTLFFATCAKEVTNNAKVNMVVSDKQLVKHLQMEVARLEAELRTPDRASSSEIIIMERDRKIRQMEKEMEELKKQRDNAQLKLEELQKKMGDNQPGWNPFDSPQRTRKCLTYSGSLQPSNKMKIRSSIRQSATAPFMLKHEIRKLEQLQQQLEVEANRAIEVLHKEVECHKHGNQDAAETIAKLQAEIRGMQSVRSDRDVDMITDEGNGSDLKEEISKLHMQDNDIAKLEAKLENVQRSIDRLVMSLPNVGTQCNETTPKSNRAKKKKRMLLPLGVSNINRPNLIRAPCSPLSSSRPLEPEVENRAPEGDTVSHEGSERATPTKSEDTGDVSSRDETPRYRRSSSVNMKKMQKMFQNAAEENVRNIRAYVTELKERVAKLQYQKQLLVCQVLELESNEGKTNDMEEDSEENAGSLQDGPDSWDRLFKEQMQHIIQLWDLCHVSIIHRTQFYLLFRGDRADQIYIEVEVRRLTWLQQHFAEVGDASPAAGDDSTISLASSIKALRNEREFLARRMGSRLTEEERERLFIKWQVPLEAKQRKLQLVNRLWTDPNDQAHIDESADIVARLVGFCEGGNISKEMFELNFAVPASRKPWLMGWQPISNMIREKTQLW

SEQ ID NO: 55961 - protein, 161 aa, Oryza sativa
MECGGGGREQQMQIVCVRGGGGGGGGGGGEEDGSSEWDQSSSRSALSLFKEKEEEIERKKLEVREKVFSMLGRVEEETKRLAFIRQELEVMSDPTRREVETIRKRIDKVNRQLKPLGKNCLKKEKEYKACLEAYNEKSNEKATLVNRLMEVSDRRAVFSGF

SEQ ID NO: 55962 - protein, 639 aa, Oryza sativa; identical to SEQ ID NO: 53967

SEQ ID NO: 55963 - protein, 299 aa, Oryza sativa
MFLLPGLVIVLHVTGALNTVLSTEHQKEIRRYLYNHQNEDGGWGLHIEGTSTMFCTVLTYVTLRLLGDESDGGDGAMVIARNWILDHGGATFTTSWGKFWLSVLGVFDWSGNNPLLPELWMLPYFLPFHPGRIWSHCRMVYLPMSYIYGKKFVGPITPIVLTLRKELYNIPYDDINWDKARNQCAKEDLYYRHPLGQDILWATLYKFVEPVLSHWPGSKLREKALKNAMQHIHYEDENTRYICSGAVQKVLNMLSCWIENPNSEAFRFHIPRVHDYLWVAEDGMKMQVLISYLGLMAIF

SEQ ID NO: 55964 - protein, 192 aa, Oryza sativa
MYTARRKIQKDKGLEPTEFEDTVAQAFFDLENGNQELKSDLKDLYINGAVQMDLPGNRKAVIIYVPYRLRKAYKKIHVRLVRELEKKFSGKDVVLVATRRIVRPPKKGSAVVRPRTRTLTAVHDGILEDVVYPAEIVGKRVRYHLGGRKIMKIFLDPKERNNTEYKLDTFSSVYRRLCGKDVVFDYPMTETA

SEQ ID NO: 55965 - protein, 172 aa, Oryza sativa; identical to SEQ ID NO: 40516

SEQ ID NO: 55966 - protein, 577 aa, Oryza sativa
MAASNTTKKGGGGGGPAIGIDLGTTYSCVAVRRRYRSEAITNDQGNRITPSCVAFTAADRFVGDAAENQAALNPTNTIFEVKRLIGRRFSDKSVQEDIKLWPFKVIAGRDDRPTIVVRHEGKEKQFVPEEISAMVLSKLRDAAVAYLGEPVTDAVITVPVYFNNAQREATLDAATIAGLNVMRIINEPSAAALAYGLDKMPPASGGAGRMVLIFDLGGGTLDVSLLNIGRPGNNNSSGSGSFEFEVKAVAGDTHLGGADFNNAVVKHCINEFIRKHGVAAEGIWSNQKAIRRLRTACERAKRMLSFTTLASIEVDSLHDGIDFCGKMSRSRFEELNKELFGKCVKAVKKCLEDAKMDKNAVDDVVLVGGSSRIPKLQSMIHDFFDEKKLRRNVNPDEAVAYGAAIQASVLNGDADEADDKKQVMILRDITPLSLGIEVGLDHTMSVVIPRNTFIPTKKVRRYSTIFDNQIAVSINVFEGESASILRNNLLGKFVLSGILPAPRGVPQIDVTFEFDANGVLHVSAKDMGTGSKNNIAITNHSGRLKKEDVERMTREARSYNRTRSSLAITSGNLVIFQ

SEQ ID NO: 55967 - protein, 262 aa, Oryza sativa
MGKYMRKFRGATGEELAAMEVTQVVGVRTRSRSAAAAGATTTKVKAASAASTRRRKALLPTAVVGTTRRDGGSCYLQLRSRMLFMAPPRPAPAARAPVVAEAAGSGNGAAAHAAAGLSRCSSTASSVDAAAQDRSLACRSDVAEAGSEHVPEGSASDSASGRDRERRETTPSSFLPGEVSDLESDLAGGQKRSRPLPSAATASAQQATRPKIPPAAEIEAFFAAAEEAEAKRFAAKYNFDVVRGVPLDAGRFEWTPVVSSRS

SEQ ID NO: 55968 - protein, 237 aa, Oryza sativa
MVVQEFTVDLNKPLVFQVGHHEERYQEWVHQPIVSKEGPRFFGNDVLEFLTRTKWFAVPTIWLPVVCWLLVKSIRMGHTIQEVGLMALFGIFIWTLIEYTLHRFLFHIGTKTYWANTAHYLLHGCHHKHPMDSLRLVFPPTATAILCVPFWKLVAFFATPTITPALFGGGLLGYVMYDCTHYYLHHGQPSKEPAKNLKRYHLNHHFRIQNKGFGITSSLWDYVFGTLPPSKTTGKNN

SEQ ID NO: 55969 - protein, 556 aa, Oryza sativa
MTKALQAAGGKPWRPGKMSTVLVAVLMTMPPLVVIFSGRIGDQAMWIKTAVDGIRGGTDDDVSFMKHPTTSHDKLLGGLLVDGFDQESCHSRYQSAAYRRNAGRRPSEHLVSKLRRHEDLQRRCGPGTAAYSAAVEQLKSGKSPAAAEASPEACRYLVSISYRGLGNRILAAASAFLYAMLTDRVLLVDPSNEMGELFCEPFAGTTWLLPPEFPLVGYQGFYLHTAERYGKMREDRVLRPDGGEAAAAAPPPAFAYIHLDYNQTDYDKLFFCDEDQRLLSSIQWLVMRTDSYIVPGLFLVDAFQDELAALFPERDAVFHHLGRYLFHPANHVWGLVTRYYRGHLAWARRRVGIQVRVSSWEWESPEILRTITSCTQDEGLLPRVLDDTDQEPPATAPASARRGLRPSAVVITSLKSWYYEKMKGMYWERATESGEVVVFDQPSHEEQQMYGVRAHERKAWAEMYLLSTTDVLVTTGTSTFGYVAQGLGGLTPWVLPRREVNGTAPPCRRDMSMEPCFHVAPLYDCKRWEDAGKIVPHVRHCHDMPAGLKLVDRTEW

SEQ ID NO: 55970 - protein, 690 aa, Oryza sativa
MRRDDAAGGGGGGFQELFDSVRRSISFRPGGSAAAAAAALDEPASASGGGGFRGRISTCLRKSRGMGLLGMVASKSPSPPRRRLLPPPRSPPPAPTKSLSPQPAVVSQGGGGAGGVGGGEEEEANPPIRWRKGDLLGSGAFGSVFLGMDLDSGELLAVKQVLIGSSNATREKAQGHIRELEDEVKLLKNLSHPNIVRYIGTVREENSLNILLEFVPGGSIQSLLGRLGSFPEAVIRKYTKQILHGLEYLHRNGIIHRDIKGANILVDNKGCIKLADFGASKQVEKLATTAKTMKGTPYWMAPEVIVGSGHDFSADIWSVGCTVIEMATGKTPWNQEIQEVSLLYYVGTTKSHPPIPEHLSPEAKDFLLKCLQKEPELRSTASDLLLHPFVTGGLEDLHQVNHATHKETSELPAYDMPTGDLGLNHSGNPSNLNSYKSSDMRPIWDGHSSDDMCQFAENDVVMVGSSFNPMSEPFDDWESPEQRSSQSREFGGLAKHVENNMSENDFTFPCEGGCEEDDELTESKIKEFLDEKAIDLKKLQTPLYEFYNTVNAGLSQGVGETCQVDNITDLQLPLQGRSPPIQMEGVAAVGPTSDILKSASPKSCTRRFSRSGVENGRILREIASPQLNKFEDKVHDIQDNPSISFSERQKKWKEELDQELEIGRVMRLGSFGKAPSPKSRGMTRKRDRVY

SEQ ID NO: 55971 - protein, 416 aa, Oryza sativa
MQQEQADGREIVIAGAGLAGLAVALGLHRKGLRSVVLESSPTLRTSGLAFITWTNAFRALDALGVGDKMRSQHQQIQRLNVMSSATGEIVQEIDLRAQGKRGTHEARCVSRTALLLALEEELPRGTIRYSSKIVSIEEDGNAKILHLSDGSTLRAKVLIGCDGINSVVARWLGLAKPSDSGHTATRGRAKYPDGHGFEPRFLQLVGQGFRAGMVPCNDTDVYWFFTWSPSPDDKDVDKSSAATKQFVLTKLRSTNVPPQVLEAVERSEMNDVLAAPLRFRSPLSLPFASISKGNVCVAGDALHPTTPDLAQGACTALEDAVVLARCLGEALLLRTGDCAAEESHRVVEAALRRYADARRWRSAQLTGASYAVGFVQQSDHPAVGFLRDKLLSGVLAKTLLMMPDYDCGTLSSSGAC

SEQ ID NO: 55972 - protein, 814 aa, Oryza sativa
MTTLLYISLGFLLFSLHVTPPCSAATNDTLAAGEVLAVGDKLVSRNGRFTLGFFQPSVVVKSGNITSPNWYVGIWFSNISVFTTVWVANRDSPVTELQLNQTQLKLSKDGNLVISSNASIIWSSTVNRTSATTMNSSTSVVLSNDGNLVIGSSPNVLWQSFDYPSDVLLPGAKFGWNKVTGFTRRFTSKKNLIDPGLGLYYVELDNTGIDLSRSNPPNMYWSWSSEKSSSALISLLNQLININPETKGRINMTYVNNNEEEYYEYILLDESYYAYVLLDISGQIEINVWSQDTQSWKQVYAQPADPCTAYATCGPFTICNGIAHPFCDCMESFSQKSPRDWELDNRTAGCSRNTPLDCSNTTSSTDVFHTIARVRLPYNPQIVDNATTQSKCAQACLSYCSCNAYSYENSKCSIWHGDLLSVNRNDGIDNSSEDVLYLRLAAKDVPSSRKNKIKPIVAVVAASIVSLLVMLMLILLVLRKKLRFCGAQLHDSQCSGGIVAFRYNDLCHATKNFSEKLGGGGFGSVFKGVLSDSTIIAVKKLDGARQGEKQFRAEVSSIGLIQHINLVKLIGFCCEGDERLLVYEHMVNGSLDAHLFQSKATVLNWTTRYNLAIGVARGLSYLHQSCNECIIHCDIKPENILLDASFAPKIADFGMAAFVGRNFSRVLTTFRGTVGYLAPEWISGVAITPKVDVYSFGMVLLEILSGRRNSYKVHTDDNSDQVAFFPVQAISKLHEGDVQSLVDPQLNGDFSLVEVERVCKVACWCIQENEIDRPTMNEVVRVLEGLQELDMPPMPRLLAALAECTVVAHCDDDS

SEQ ID NO: 55973 - protein, 199 aa, Oryza sativa; identical to SEQ ID NO: 40472

SEQ ID NO: 55974 - protein, 144 aa, Oryza sativa
MEKNELLRSPYECAVLQEACVAQMQPSTECPQQALLNCFAWPSIRLLPAHVYDGVFHMITSYIIISVHLISLHMIIKCLASIYSRSLAYIKPLIQGGVQNQQMVHLYYLQSDSTELVGIWTPDITLISPCSSAKQEKSAVYLNC

SEQ ID NO: 55975 - protein, 101 aa, Oryza sativa; identical to SEQ ID NO: 33709

SEQ ID NO: 55976 - protein, 262 aa, Oryza sativa
MGTGSVTVKQKKRVKHTKNKYLKPGALAQIRYSRSTSRDIGKKRILLNVDKDELPQEEVAFENTEPMMSPKRLNFEPFSGTKGQVMPITPKTPQSDELSDGHSRLESLPLELLIKIICCLHHDQLNIVFHVSKRIRKAVELARQYHFNYTTPDRSRQELLQHTTPLPTEHWPFMSRIDGKDVRISTPRTPKAPKHAPRLARLELLDFKPITAVLFPDTFPSKRLRRSMPPGLPRPVSKAASSTRVLLYEEELCEAVAQNKLL

SEQ ID NO: 55977 - protein, 394 aa, Oryza sativa
MEKLSMVTSLLCAITVAVLAVAVVSGEAAVVEHTFVVHEMNATHLCNTTKIYVVNGQFPGPTVDVTEGDTVVVHVINKLPFGLTIHWHGVRQMRSCWADGAGFVTECPIPPGNEHTYRFNVTGQVGTLWWHAHVTCLRATINGAFIVRPRDGKYPFPTPAKDVPIIIGEWWELDLIELDRRMMDGNFDDNPLSATINGKLGDLSNCSRMVEESFILDVKHGESYLLRVINTALFSEYYFRVAGHTFTVVGADGNYLTPFKTDMVTVAPGEAIDVIMVADAPPAHYHMIALANQPPEPDPQIPVFTSRGLVRYAGTTATTTASRYRCRSCPTNTTPCRPTTSTPTSPALPTQSAIVSLCMSTSASSSPWGSAPYAVARTPPASGGAARRPSWWPP

SEQ ID NO: 55978 - protein, 85 aa, Oryza sativa
MPSRPRGPRLQLVGSRAARLFAGVPPPAPPTRTLPPRALHRPRRPHHPPRHPGLRPPPPSPSVEPRAGGLRLPRLACRGVATSSC

SEQ ID NO: 55979 - protein, 62 aa, Oryza sativa
MPHHARPMTGLLLFTGVNLVLLNTITPVYDFVCFHPYWERRRERRQKERKALQANGSLQTAK

SEQ ID NO: 55980 - protein, 509 aa, Oryza sativa
MDPSSAGAGGNSLASASCGDAQKRRVCYFYDPEVGNYYYGQGHPMKPHRVRMTHALLAHYGLLAPAKMQVLRPLPARDRDLCRFHSDDYVAFLRAVTPETQFDQIRSLRRFNVGEDCPVFDGLYAYCQTYAGASVGAAVKLNHGTHDIAINWSGGLHHAKKSEASGFCYVNDIVLAILELLKLHERVLYIDIDIHHGDGVEEAFYTTNRVMTVSFHKFGDYFPGTGDIRDIGYSEGKYYCLNVPLDDGIDDDSYQSIFKPIISKVMEMYRPGAVVLQCGADSLSGDRLGCFNLSGKGHAECVKFMRSFNVPLLLLGGGGYTIRNVARCWCYETGVALGEELREKLPYNEYYEYFGPEYSLYVAASNMENRNTNKQLEEIKCNILDNLSKLQHAPSVQFEERIPETKLPEPDEDQDDPDERHDPDSDMLLDDHKPMGHSARSLIHNIGVKREITETETKDQHGKRLTTEHKVPEPMADDLGSSKQVPTADANSMAINAPGNAKNEPGSSL

SEQ ID NO: 55981 - protein, 539 aa, Oryza sativa
MEVFGPVTAGQVSFLLSLFPVLIAWIYSEVLEYRKSSSMKVHSDSNLENGTVKEDDKTVLLEGGLSKSPSTKFRINSTKANLIRFITMDESFLLENRAVLRAMAEFGIVLVYFYICDRTNIFPESKKSYNRDLFLFLYILLIIASALTSLKKHHDKSAFSGKSILYLNRHQTEEWKGWMQVLFLMYHYFAATEIYNAIRVFIAAYVWMTGFGNFSYYYIKKDFSLARFAQMMWRLNFFVAFCCIVLDNDYMLYYICPMHTLFTLMVYGSLGLFNKYNEIPSVMAMKIVSCFLAVILIWEIPGVFELLWSPFTFLLGYKDPEPSKANLPLLHEWHFRSGLDRYIWIIGMIYAYFHPNVERWMEKLEESETKVRLSIKGTIISISLVAGYLWYEYIYKLDKITYNKYHPYTSWIPITVYISLRNCTQQLRNVSLTLFAWLGKITLETYISQIHIWLRSNMHNGQPKWLLSFIPGYPLLNFMLATAIYLLISYRVFELTGVLKSAFIPSRDNNRLYQNFVAGIAISVCLYFLSIVLLKIPIV

SEQ ID NO: 55982 - protein, 347 aa, Oryza sativa
MATASLVCRAMGDQLEGNEEEHMKYRAMIVQYIKEHRVDFEPFIEDEEPFEKYCDSMLEDGTWAGHMELQAASILKRKNICIHMLNSPRWYIRNFSDREATSMIHLSYHQGEHYNSVRLREDPCQGPAMPVIIKADANVASTSNNAQTKAKDLKKSSDRSKYDHISVKLVMAGTGCSNIAAVEQVLKDMDGDIDAAIEYMLAEQLILGSDGADGDPYLDYACDEYVQTIEDELSMKQDESQLDEHEKEEKDCSSKGETAQKHNSSHSKKGKSKTKECSCGSARKHKPSCNLATTVASREPPKTTAPSREPPKYGFIMVLLKIWRHIFDLISVIFFPFGLLPFFYTPM

SEQ ID NO: 55983 - protein, 104 aa, Oryza sativa; identical to SEQ ID NO: 54950

SEQ ID NO: 55984 - protein, 445 aa, Oryza sativa; identical to SEQ ID NO: 29958

SEQ ID NO: 55985 - protein, 301 aa, Oryza sativa; identical to SEQ ID NO: 46687

SEQ ID NO: 55986 - protein, 166 aa, Oryza sativa; identical to SEQ ID NO: 31188

SEQ ID NO: 55987 - protein, 126 aa, Oryza sativa; identical to SEQ ID NO: 53716

SEQ ID NO: 55988 - protein, 68 aa, Oryza sativa
MEFQCLGWKLDQQICHHFQGLRVIPMAVCSTFQLLDQNWLSCFSTNLVKPLGVPLVFTSPHILVLSKM

SEQ ID NO: 55989 - protein, 418 aa, Oryza sativa
MSVASSDPISDNLVVFSRMARCSVSRVVLLLLCCMHLSAAAAGAAVYNVESYDARPDGRTDASRALASAWSAACRSPEPATVYVPDGEFFVSHSAFAGPCSGGRMTVQIDGTLVAPSGYTGSASSGGEWIVFDHVDGLTVSGGTLDGRGESLWACKAAGHGGCPDGATSMKVLNSRDVVISGVKSVNSELYHVVIDGCEGVAVQDARIVAPGSSPNTDGIHVQSSSAVTITGASIQTGDDCISVGPGTSNLRVEHVSCGPGHGISIGSLGKESEEGGVENVTVSGAAFVGTENGLRIKTWGRAARSGAYVRGVVFEHALMRDVSNPIIIDQSYCPNDGGQGCPHQSSDVQISGVTYTDIQGSSASQVAVKFDCSASKPCSGLGLQDIKLTFDGGKPAEATCQHADGTASGVLMPPSCL

SEQ ID NO: 55990 - protein, 524 aa, Oryza sativa
MDNSHEQPLPPGVGAWPPPPSIHPAKFQPNPQPYATPYGATPNNGSNHNAASYSAAAQPTMPFPNMDAGGAQSNQTAHEVSNHNDSAADIESAVQEAVLREQDIETQQVIQNQRQAKATIEPTQYGEDLLSNRRNPNALKEHLLKMTAEHRAEMANKRGKPLHADNGNVEIGNGYGVPGGGAYYAANMSSGQMNKPKDIADKAKGADDLPEFLRQRLRARGILKDEATNNRFTIKQNVDSPVGQIKAAQELPPGWVEAKDPTSGASYFYNQSTGTTQWDRPGAPLNTMQHQAPPSSSLPENWEEALDQSTGQKYYYNTNTQATQWEPPTAVNPGVAPHAPTNAAVEMAAQNTDIWNSQMQRCLGCGGWGVGLVQPWGYCNHCTRVQNLPFQQYPSYPNNTTHSSSNKNPGNVAAKDRSSAKPPFGKANRKDHRKRNRPEDDELDPMDPSSYSDAPRGGWVVGLKGVQPRAADTTAAGPLFQQRPYPSPGAVLRKNAEVASHGKKRGMAPITKRGDGSDGLGEAD

SEQ ID NO: 55991 - protein, 678 aa, Oryza sativa
MMLAGYGILAVVLVLLPPSATPAGIADCDLGVGNTYVGNSTFEANLNHLAAELPGNVSTAHTGGFAVATVGADPDQVFALALCRGDVNATACRACVAAAFVDGKNACPGINGVTVYEDACVVRFSGQRFMDFLSPDQWQVTEMIWVPEQASESVNAPAVGWFNAAIAKILAALVDHAVATATGNNSTTKKYFATGEEDFDPNIYGFAQCVPDLTQEQCKECLNTFLFQAKQVYFGKSLSWVGMNSVWCRLMYSVRPFYGGRAMLQLSAPPPPAAEAPVLSLEPGAGKKKSAAGIAAVVASSVVVLLILSFFAVVLFRRRSKVTETDHQLRKITRAQCLIFDLPALQEATDNFSDNNKLGEGGYGIVYKGVLSDGQEVAVKKLLGTSEHGLDQLQNEVLLLAELQHKNLVKLQGFCLHQGETLLVYEYVKNGSLDNFLFDTSRGNTPNWEQLYNIIFGIAKGILYLHEDSSLRIIHRDLKSNNILLGEDMEPKIADFGLARLLEEGHTNTRTTRIVGTFGYMAPEYAIHGNVSTKIDVLSFGVLVLEIVTGRRNLNSDDHDRGNLLSDVWNCWTKGTVTQLIDQSLEEQFRRQALRCIHIGLLCVQSDPDDRPHMSSVIFMLSRENMNLQPPAQPAFFFDGDSNSCSQPFEQPVYNRPNAIYEEDISVNRMTVTDIYPR

SEQ ID NO: 55992 - protein, 179 aa, Oryza sativa
MASKNPKVFFDILIGKARAGRVVMELFADTVPKTAENFRCLCTGEKGLGASGKPLHYKGSAFHRIIPNFMCQGGDFTRGNGTGGESIYGDRFADENFKLRHTGPGVLSMANAGPNTNGSQFFICTTRTTWLDGKHVVFGKVVDGYTVVEKMEQVGSGSGGTAERVLIEDCGQLADDHAN

SEQ ID NO: 55993 - protein, 721 aa, Oryza sativa; identical to SEQ ID NO: 55258

SEQ ID NO: 55994 - protein, 54 aa, Oryza sativa
MIYLKAREAEMRTVSEKTNARVAWFSILSLSVCIVVSILQLWHLQGYFQKKKLI

SEQ ID NO: 55995 - protein, 916 aa, Oryza sativa
MDNKTWLWRKKSSERTISTKNKANISEREQEKEKIARLERSLQCLNEQISFAQAECVEKDAILAKQAKVAEEAILGWEKAEGEAIAIKTQLDDTLDQKAAIEQRICHLDEALNVAMVERELLIKDTAKLISHEQVKVERLEGDVVEKINIIASLDAENRKLSEMLSMKEKMISELTEAKGVIESNFKNLEVKLESADKLNSSLRYEVCMLQKQLDIRSEERKFNLKSADAAHKQHLENVKKITKLEAECQRLRSMVRKRLPGPAAIAKMRNEVETLGNNAVITRTRRFNSTTSFNSGNLVQNSYDASHESSSLLARLHAMEDENKTMKESLSSKDGELQYSRTMLARTTSKLSQVEAQLEELSRGRVATDLVKCSPTVVENPLSSISEDGCNEDNVSCSSSWASALISELEHFKKGKLTTPSCKSTGVSDLSFMDDFEEIEKLALACDAKPTESYDSRRESRESSGKELVTVDGPIETSDQLRQHKIEKAVLKLIELIEGVVQRSSKDYSSTVVLSGGSEGDRSNTLTGYVARAFLWKTSELTSVLQNFVLGCNELLYGSTDVERFVLEINITLDWIISHCFSLQDVSDMRETIIKNLEINSSSGLEVVPVIKHTGIQTTDGMCEPRTPNKMQMAIVSVSSLMDIGYKADDDSEIFRNKIPVSKCEESEGKASSLRAELNALKETGKMMAHGVDGESTINELGKPSNSDINKGNQHGVSSLESKLQLERFPAKEGPKCVSRNEDQHVQMRLEISTASEKLIECQETILNLGKQLKALASPKDAILFDKVVHTKIQSERKPRSQSLNEMLAMDDGGFDYLSSPKTKEIICAELRSRHERSCSVDNGGDDSVTCSSHPMPVAPPMRPYDVNGTCKDEAALKVVALMPSKQKGNTNLLKRILAGRRKEAMTRPNVVATA

SEQ ID NO: 55996 - protein, 198 aa, Oryza sativa
MDDGEIELSSQMMFPNPETPTSLDDFLPSIRTTRTHTHTCNPPGPSATAHTHTCYHTHTHVFSSDDDSCGGDKAKPKKGRKPLGNREAVRKYRQKKKAHTAHLEEEVKRLRAINQQLVKRLQGQAALEAEVVWLRSLLVDVRSRINGALGSCPFQAQCGVNNVLGCDGMAQCFAGKPELGERRICTPSVMNCHISPDS

SEQ ID NO: 55997 - protein, 369 aa, Oryza sativa
MAASPSAPPPPAAAAGVGVWSPAPQSPSPNLANFFVWREFVWGAIAGAFGEGMMHPVDTLKTRLQSQAIITGAKAQKNIFQMIRTVWVSDGLKGFYRGISPGVTGSLATGATYFGVIESTKTWLEHSNPNLSGHWSHFIAGGIGDTLGSFIYVPCEVMKQRMQVQGTKKSWALTATKGNISQTPGAPMYNYYNGMFHAGCSIWRDHGLKGLYAGYWSTLARDVPFAGLMVTFYEAMKELTEYGKRKYLPESNLHASSSFEGLLLGGLAGGFSAYLTTPLDVIKTRLQVQGSTTSYNGWLDAITKTWANEGMSGLFKGSIPRIIWYIPASAFTFMAVEFLRDHFNEKIDTDARELTGLSMDTRSEVEEAA

SEQ ID NO: 55998 - protein, 659 aa, Oryza sativa
MAGGGDLQSPKKRKRDAAGKPKTLAKGGDDGKKRKRPSDANMAQGGGGGEVKVKKEPVTAKEKRLAAKEMAESRKKKRKRNYSLEKELTVLWEKMRCHNVSSTERSKLVSEALRKMDGKYSEIAGSHVTARVLQTCVKLCSQSERDAIFEALQPDLLTLSLKKYAVFLVKKLIKRATKKQFEWFISSLHGRVAKLLRHTIGASVVDFAYQLATPPQKRRLLLELYSTELQLFTDLTGQKTHSLLETISNLGLQKSSVLQHMTTVIYPILEKGIVEYPIVHTAVLEYFTIADKTSATDVIRQFIPLLTQGSSAIDGDEPSVAPELQKKLKAKKKRLTEPLLVRIMNTREGLKIGVSCLKHGSAKDRKKIIKSLKGHIMKLALSDYGCILLVAILSVVDDTKLVTKIVIQELAKHLKQLIFDKNGRRPLLQLLHPNCSRYLPPADLACLNYRVPSLISKDEASESAAEDIPENKVDVATNKEQDGSESMQSASDSKKDPFQRRHELLIKSELAEVLIQTLIENVGELLRTNFGKDVLHEVAVGGEDNILEGITDRIHSLHNAIASDAARPKAEDTEHAFDNYHSSRLIRRLILESPAFAAILWKKALEGKCKTWADGHSSKVVAAFLESPYSKVRDLAKAELQPLVDRGILKISDHKAVEK

SEQ ID NO: 55999 - protein, 947 aa, Oryza sativa
MYQWRKFEFFEEKAAGRGVPGEIASRVSCCSGGRGRVAVGCDDGTVGLLDRGFRLSYGFQAYASSVLFLQQLKQRNVLITVGDDDQPSSLSSAICLKVFDLDKVQEEGSSTTSPFCVQILRIFTKQFPQAKITSFVVLEEAPPILLIAIGLDNGSIYCIKGDIARERITRFMLQVEDGTSLPITGLGFRVEGQAHQLFAVTTSSISLFSLHDHPPRRQTLDQIGCETNAVAMSDRMDLIIGRPEAVYFYEIDGRGPCWAFDGEKKFVGWFRGYLLCIIEDQRSRKNTLNVYDLKNRLIAHSMPVGDVSHLVSEWGYIILIMSDKKILCIGEKDMESKLDMLFKKNLYTVAINLVQSQQADPASTAEVLRKYGDHLYGKQEYDEAMSQYIHTIGHLEPSYVIQKFLDAKRIYNLTNYLEKLHDRGLASKDRTTLLLNCYTKLKDVEKLNHFIKDEDGVGEIKFDVETAIRVCRAAGYHEHAMFVAKKAGRHELYLKILLEDLGRYDEALQYISSLEANQAGLTVKEYGKILVEHRPAETVEILLRLCTDGGDPMTRRGSNSMHLLMIPSPMDFVNIFVHSPKHLMEFLENYTKAVKDSPAQTEIHNTLLELYISKDLSFPSMSQENGFEEQNSKERKGKEVANGYKSGPREKGNLGKEDMNVAKDIVDRQRKGLALLKSAWTSEMDDPLYDVDLALIICNANAFKDGLLFLYEKLKLFKEVISCYKQAHDHEGLIACCKKLGDSSQGGDPSLWGDLLKYFSELGEDCSKEVKEVLTYIEKEDVLPPIVVLETLSKNPCLTLSVVKDYIARKLEQESKLIEEDRKSIDKYQDETELMKREIEDLKTNAKVFQLSKCTTCTFTLDLPAVHFMCMHSFHLRCLGDNEKECPECAPEYRSVMEAKQKLEHNARDHDLFFRQLRGSKDGFSVVADYFSKGIVSKTAIPPENGR

SEQ ID NO: 56000 - protein, 482 aa, Oryza sativa
MDERNISIAKTIANDIIIPDPAPEWMCYTFLDKYDQLEPIFIKDSARCFLRLFKNWKGYTMSWNLTITAQTLTCMVSFNSLRCAKVVLEGRAPELLGVHANPNCVTKYGYFPLHEAAERFSIEMIKLLLRHGASANVRTVGDDVIDGLLLLHIAIENTCLHKYLEDNLSPGQDHLDYIYKLFHLLCLPEMKIFLDTTRLLAGKTNNLLEELWNYIENGKLIQTAILLLAAQEQIRGGCSSKINGSRKKNGYDIMYKRILRLSFALRWGKVSNGMTQKLMKEKRALIDCMGLLVDAISHAGEPLSAYIQAHSEAPHVEVLEHVSTILKEYGFCPTEEVMDTINLQPYDCKMSETKSCSKGFTDANTAVAEMANLHAADKKAGRKEVGRGWDPTYTRRNFFPYWRSILRTRCPVKVYPTYARADARSGRDLEQIRAFESNSSMAKNRILGSVGRIPSLLASNHQSKRSFSTAATGAFRLLKLLK

SEQ ID NO: 56001 - protein, 300 aa, Oryza sativa; identical to SEQ ID NO: 30144

SEQ ID NO: 56002 - protein, 477 aa, Oryza sativa; identical to SEQ ID NO: 51479

SEQ ID NO: 56003 - protein, 467 aa, Oryza sativa
MAFSFASPAPQNPFQTPAQAPSLSPSPFQFNLQQPQQQQQQPPPQQQAAPAAQPQQQQLMLYTTDGKPAGYNTKWEELHAESQKALLQIEDKIREYRDESERLDQCSRLHDSSISTVNFENDASEIAQELGGTTTMMEREKASVQELMTVVNEMMRNTEFAIRSYMMLRPRFIRPGAGANGGGSNPSGPAGAQSNQPVALAPTIDFYSGIPKRPSHFMQQTINRFEKYLGECCKWIAELEQLVQMENNKRQSASLESLPKVMSNVHDYFIYVASKVENLHQYVESLKTEYLHEQRRLGNANDPFLEANRREAAKQEAAARRVHPTLHLPAPVQPTTQIAGTVTSQPQQSLIPSGATSSSAFPSFSTPASAPSSSSLFSTPTTPTLSSNLFGTSGSAQLSTPFGTVSTPTLGSTPAPSGFGNTTPSFASTPALGGTSLFSTPFGGGATASGSSFGGTSKVRSKPRGRR

SEQ ID NO: 56004 - protein, 155 aa, Oryza sativa
MEQSAIGYIARSSLLSKGVSSFVSFIGSLQASVTRGIMRRLLGPSWSVTAVEATCGHLLWYHTMRNVLFMAMTEFTKLSEEPDWNFISAKQDQIAFLFDVDDHWGPLAHLEEISKRAPGVALSVETEGHTHGYCCTEAGSFWAADYVANLIKTKF

SEQ ID NO: 56005 - protein, 432 aa, Oryza sativa
MEGNNLPSGSLMRSNSGQMHAPNPGKQGFDHTQMPGNLSMHVNQSTDSDHLSEFQFGELGKVDHHHHHHHRQHAKNGMSDDEEHGVNEDATDSQSGKGKKGAAWQRMKWTDSMVKLLITAVSYTGEDPGADSGAGKRNSAIMQKKGKWKAISKVMGERGCSVSPQQCEDKFNDLNKRYKRLTDILGRGTACKIVENHALLDCMSNLSDKMKDDARKILSSKHLFYEEMCSYHNNNRVSLPEDPALQRSLQLALRCKDEHDLRRGTSGDADEDDQSVDSDSEEENDEENYTLQGDKSALPMHKRLRLMTDQEDVGFGNSSSSHGCSRRSDSHGISLDINKAFPDGTNLALAQKDLATQSADLEEQRLQIEVQAVYLAKQRLKWERFSKNKDRELEQMRLENEKMRLENKRLELEVRHKELELELKQKGSGNHA

SEQ ID NO: 56006 - protein, 192 aa, Oryza sativa; identical to SEQ ID NO: 48238

SEQ ID NO: 56007 - protein, 491 aa, Oryza sativa
MSDHQFAGQPDVQCLVCTRPFTLDAQVTDTFEALAICRDCKATVLNDVERDEITSTSHHTRRRRQRSRTASIDSLEDAFSQEFSQLIDLARRQGRETDIDSSSVLPQHASYNATPSHSQRWHASDDESDGLNYVDSVFGEIESTISFGDYGADSDTSIEEHSVSARRRISIQLDNGSYMNTDTDIDPMNARLDQWDSDDQEDVEESGFDETINTMTQHQQQSHDIQLSGLSEDESEDGVWNWSVAVRQRANVTNLLEDMEGPEMRTTFVGNPDDYVDARQFEMLLEQFAEDNSSRRGAPPAATSFIENLPSVIISTSHQINDDVICPVCKDPIPTRARAKQLPCMHLYHSSCILPWFSSRNTCPVCRYELPTDDAEYERSKQATTNVRDIQVVEENSDEQEVQVTRQMAVGAIEETNTSEHNVRVDEQPSSARRRSGWLFIAAAPVVSLIGFALVLCFTNPARSGRRQLYCRSPSATEVHVGTKKSWWSMF

SEQ ID NO: 56008 - protein, 292 aa, Oryza sativa; identical to SEQ ID NO: 30449

SEQ ID NO: 56009 - protein, 272 aa, Oryza sativa
MAGATDLPPKGGFSYDNCARNAMLVEKGLKMPGFLKTGTTIVGLVFQDGVVLGADTRATEGPIVADKNCEKIHYMAPNIYCCGAGTAADTEAVTDMVSSQLQLHRYATGRESRVVTSLTLLKSHLFSYQGHVSAALVLGGVDVTGPHLHTVYPHGSTDTLPFATMGSGSLAAMSVFESKYKEGLTREEGIQLVAEAIRGGIFNDLGSGSNVDVCVITKGKTEYLRNHQLPNPRTYVSSKGYNFTKGQTVVLSTKITQLKPKVEVTEGDAMEE

SEQ ID NO: 56010 - protein, 528 aa, Oryza sativa
MADDSASPSPSSASPLQHHREALKSSVRNTAASRRREQAIAIGKERREALIRAKRVCRAPISGSDEAEMEEGDMVVDEEKACLEAKTAHAVEELKSALSIQGKGVQKKKIEALRDLRRLLSQPEVPLVDTAIKAGAVPLLVQYLSFGSSDEQLLEAAWCLTNIAAGEPEETKSLLPALPLLIAHLGEKSSTLVAEQCAWAIGNVAGEGAELRSTLLAQGALRPLTRLMFSSKGSTARTAAWAMSNLIKGPDPKAANELITIDGVLNAIIASLEKEDEELATEVAWVVVYLSALSDRGISLIVRSSVPQLLIGRLFSSENLQLLIPVLRGLGNLIAADDYMVDSVLTVGHNIIDQALSGLIKCLKSDNRVLRKESSWALSNIAAGSFEHKKLIFASEATPVLIRLVTSMQFDIRREAAYTLGNLCVVPTGNCELPKIIVEHLVAIVDGGALPGFIHLVRSADVDTAGLGLQFLELVMRGYPNKQGPKLVEMEDGIEAMERFQFHENEQMRNMANGLVDEYFGEDYGLDE

SEQ ID NO: 56011 - protein, 113 aa, Oryza sativa; identical to SEQ ID NO: 46670

SEQ ID NO: 56012 - protein, 479 aa, Oryza sativa; identical to SEQ ID NO: 43348

SEQ ID NO: 56013 - protein, 392 aa, Oryza sativa
MKISVKTLKGSTFQIEVDSAQKVADVKRIIETTQGQHIYPAEQQMLIHQGKVLKDDTTLDENKVLENSFLVIMLRQGKGSSSSAPATSKAPSNQAPPTQTVPAAPASQAPVAPATTVPVTVSAPTPTATASPAPAVAVSSEADNYGQATSNLVAGSNLEATIQSILEMGGGIWDRDIVLHALSAAFNNPGRAVEYLYSGVPEQMDIPVPPPSIQPANPTQASQATQPAAPSILSSGPNASPLDLFPQALPNASTDAAGLGNLDALRNNAQFRTLLSLVQANPQILQPLLQELGKQNPQILQLIQENQAEFLHLINEPAEGDDEENLLDQFPEAMPQTIAVTPEENEAILRLEAMGFDRALVLDVFFACNKDEQLAANYLLDHMNEFDDEGPP

SEQ ID NO: 56014 - protein, 131 aa, Oryza sativa; identical to SEQ ID NO: 53722

SEQ ID NO: 56015 - protein, 355 aa, Oryza sativa
MEVGITMQIKNYNGSLSLSVLQCGCNVKDLVISLDGGASWFYQGLINAFEDHIGAAVEKAIPENIIDGTSKLDSLLQSLPRSVNLDNISALNMTFVNDPQYGNSSIEFDINGLFSSATAKLSNSQKHPQLSLSCGGASKMLLLSLDEAVFNSALEVYFKAGSMHWVVDKIPDQSLLNTASWKFIIPRLYWSYPNDDMLLNISMASPPVMRITSEKIGATIYADMIIDVLHDKETIPVACISVVVSASGVAEAAGNKVYGKVELGNFSLALKWSKIGNFHMSLIQGVIRVFLNTVCMPYLNSRLGHGVILPVVHGFTLKDIYVLTSPEKLTLCSDVAFANASSLATLPILRSPRVL

SEQ ID NO: 56016 - protein, 348 aa, Oryza sativa; identical to SEQ ID NO: 51515

SEQ ID NO: 56017 - protein, 380 aa, Oryza sativa
MADDLGPPTVLQKIHGQSMMFSKISPYSLMKNPALYNANTSYSVPLKSYNGMDGNNGFSSVTSVSPVFASAPKEKGLSGFMIDFMMGGVSAAVSKTAAAPIERIKLLIQNQDEMIKSGRLSHPYKGIADCFGRTIKDEGVIALWRGNTANVIRYFPTQALNFAFKDHFKRMFNFKKDKDGYWKWFAGNLASGGAAGACSLLFVYSLDYARTRLANDAKAAKKGGGRQFNGLVDVYRKTLASDGIAGLYRGFNISCVGIIVYRGLYFGMYDSLKPVVLVGNLQDNFLASFLLGWGITIGAGLASYPIDTVRRRMMMTSGEAVKYNSSLDAFKQIVAKEGAKSLFKGAGANILRAVAGAGVLAGYDKLQVVVFGKKYGSGGG

SEQ ID NO: 56018 - protein, 627 aa, Oryza sativa
MRSAQELASACTGAAVEEVELLRVVEANARDGMGGSRGESSSAPPPPPRSRVLRQGGLEEEYAKNSPSPLGFAPRLIRHDRQTSYELASTSRPPAPEMGEPLRIITKKAMSEKNRAYTGGNQGRSSSALLPQSRFWQGMCEEAKKVLGIAKYSSSPSRLAARILCDKQVLPESAGTSRPVLEFVDESYQQWLCSQKSTSLVADVIAAVYHDQSVLSPSASTGTLSSLLVPSEEKIQAILGNLGKSVLCTEALHQIRILCDSSKGAQSFLNKCPDMIQVLIDLTTEWKSIWTWALEEERLSIVLSLSIHRPNRERIAAQKKLPCFLKQTVEVAIESGASAAASLVKVASIVSILSEFDMFRKSVLDIGVVTLLCNLLNFENDAVRKEAAIAVLALCGYIGNNMVTDDVLLLLDYLPKGPCVLEVICNQTVVEQLVNIVMAEHESGLVTSQGIYSALSLILVITQNDVSKMKVEHMENFMKWLRELSSNELPMQTMFQLIEIISLLSQRLYSHKPKEFVVKWRDDDDQIWYPLYAEVTIGRPISTSKVARRREWTDIRIVRRLRPLRAQEKMLTKLEFCDRYQNYIQGKNTYKQLYRVAMDCNGSKIAPLSFVRKNHAVPGDNCNRPDF

SEQ ID NO: 56019 - protein, 221 aa, Oryza sativa; identical to SEQ ID NO: 31594

SEQ ID NO: 56020 - protein, 187 aa, Oryza sativa
MDRPQVVTENYANPVTCLFHVLFKAGALVFYILFSLFVKSFVIIFVITVFLAALDFWVVKNVSGRILVGMRWWNEIDDEGNSVWKFECLDGEALARMNKKDSWLFWWTLYLTAAAWIILGIFSLIRLEADYLLVVGVCLTLSLANIVGFTRCNKDAKKNIRGYFEGHAQNAITSRITSTLQSAFGVI

SEQ ID NO: 56021 - protein, 504 aa, Oryza sativa
MKKLFFFLFLLILAASVVHGEDGAYIGVNIGTAMTSVPAPTQITTLLRSQNIRHVRLYDADPAMLAALANTGIRVIVSVPNEQLLAIGNSNATAANWVARNVAAHYPSVNITAIAVGSEVLSTLPNAAPLLMPAIRYLQNALVAAALDRYIKISTPHSSSIILDSFPPSQAFFNRSLDPVLVPLLKFLQSTGSPLMLNVYPYYDYMRSNGVIPLDYALFRPLPPNKEAVDANTLLHYTNVFDAVVDAAYFAMAYLNVTNVPVMVTETGWPHKGDPSNEPDATSDNADTYNSNLIRHVMNTTGTPKHPGVAVPTYIYELYDEDTRPGSTSEKYWGLFDMNGIPAYTLHLTGSGVLLANDTTNQTYCVAREGADEKMLQAALDWACGPGKVDCSALMQGQPCYDPDNVEAHATYAFNAYYHGMGMGSGTCYFSGVAVITTTDPSHGSCVYAGSGGKNGTSLLNGTSLAPSSNSTAGDSGAHRAIGDVSSFVRAVVAALLLSVVLLL

SEQ ID NO: 56022 - protein, 246 aa, Oryza sativa
MASRVRFENSSEIGVFARLTNAYCVLPDGGAENFFSVFESELADVVPVVRTSIGGTRIIGRMCVGNKNGLLLPHTTTDQELQHLKNSLPDQVVVQRIEERLSALGNCVACNDHVALTHPDLDQGTEEIISDVLGVEVFRQTIAGNILVGSFCAFSNKGGLVHPQTSVEDQAELSTLLEVPLAAGSINRGSEVVAAGMAVNDWAAFCGADTTATELSVVESVFRLRDGRPGALGADMSRSLVVSSYL

SEQ ID NO: 56023 - protein, 479 aa, Oryza sativa
MLAGGGSRVSGGGGGFNLASYKYKDPLLGRGGRSFLFGNTWFLLSTYPARLLHTADRRAPAAFFAAINRTPCVRTHCTGQSLLQRGIVMAACGYAFRRAELGAAKRQPEKDSSVGTRISCVVAMGSAGSTPRPEVSFRHRGVEYCKKVGVSLKCREPWGPSRAFWTNAIGPSYKLSFSVEPWLRDFSTSCVAPYSAGATEHQLSLDEAVQDKQMDNSTVGPDGKPRAPGPLKLVSGSCYLPHPAKEATGGEDGHFICVDEQAIGVADGVGGWADHGVDAGLYAKELMSNSMSAIKDEPQGTIDPSRFLEKAYTCTKARGSSTACIVALKEQGIHAVNLGDSGFIIVRDGRTVLRSPVQQHDFNFTYQLESGGGSDLPSSAQTFHFPVAPGDVIIAGTDGLFDNLYSNEISAIVVEALRTGLEPEATAKKIAALAQQKAMDRNRQSPFAAAAQEAGYRYFGGKLDDITVIVSYVTSASAT

SEQ ID NO: 56024 - protein, 371 aa, Oryza sativa
MGASVTTGLQMAAARPCIPACQRLLGSRAALPSFGRALSTQTGFASCRKTASAGPFVSLNHKRFAVRAMSAQGLPIDLRGKRAFIAGVADDNGYGWAIAKALAAAGAEILVGTWVPALNIFETSLRRGKFDESRKLPDGSLMEITKVYPLDAVFDSPEDVPDDVKANKRYAGSSNWTVKEVAETVKNDFGTIDILVHSLANGPEVKNSLLETSRKGYLAAVSASSYSFISLLQHFLPIMNPGGATISLTYIASERTIPGYGGGMSSAKAALESDTRVLAYEAGRKGKIRVNTISAGPLGSRAAKAIGFIEKMIEYSYVNAPLQKELLADEVGNTAAFLASPLASAITGSTIYVDNGLNTMGLALDSPTLST

SEQ ID NO: 56025 - protein, 42 aa, Oryza sativa
MFEVIGWQLDARLTYQYISGMQEVERYCTKLGLRGPAQLLLL

SEQ ID NO: 56026 - protein, 579 aa, Oryza sativa
MAGSFVAVRGKPRSSPKRSGGGGGADPPLSLAMPTVADLHKTAELEKFLVEAGLYEGEEESAKREEVLREIDQIVKEWVKKVTIQKGYSEQMVKEANAVLFTFGSYRLGVHGPGADIDALCIGPSYVKREEEFFVMLYGALSEMEEVTELQPVPDAHVPVMKFKFRGLPIDLLYASVSLPVIPPDFDISQGSVLCDVDEATVRSLNGCRVADQILRLVPNAEIFRKTLRCLKYWAQRRGVYSNVTGLLGGVSWALLVARVCQLYPNAVPSMLVSRFFRVFTQWQWPNPVMLCAIENDDNLGFAVWDPRKNPRDRSHVMPIITPAYPCMNSSYNVSTSTLRVIMEQFQFGNKICQEIELNKASWSSLFEPFQFFEAYTRYLVVDIVADDDDDLRLWKGWIESRLRQLTLKIERDTKGMLQCHPNPCEYADPSIQCAHCAFYMGLSRKEGMKIRGQKFDIRGTVDEFMHEIGMYTQWKSGMDLAVTHVRKKEIPLYVFEQGCQKTRPPTPICAEQQDQSDKNDSEVCTTTASLVGQLKRKYHSVGGADVDSFKSVRRASVSPACEEASIQLHDDVMMQILD

SEQ ID NO: 56027 - protein, 531 aa, Oryza sativa
MHPLTLSSTALLRLIKSLSPAVRRAHLSASSIHCLLLKAGLLHVGAHLPTALLSAYAALGSPDHARRLFDEMPEQGLVPRTAMARAHVASGQAAQAIAVFGDMVADGVFPDNVALAVALGACHGAGSWTARRNPGKKIHALIVTSGIEPDVFVSTELIRVYGECGKLAVSRRVFDDMPSRSTITWNAMLHQYARHGKVDTAYELFLAMPRRDVVSWNTVMAGYCVAGRCREALGLFRQMVSPSSCAVHPNVPTMSTILGACAGAGCLETGIWVHAYIERNRMNDDGYLDRCLIDMYCKCGSIDNALQVFEKAPRKRDLFSWTTVICGLAMHGRATDALRMFDMMQDNGICPDDVTLVGVLNACAHGGLVDEGLGYFYSMEAKFRITPKIEHYGCMIDLLGRVGRLQEAYSMIRTMPMDPNTVIWGAFLSACKVHGNMELGKIAAEELTRLDPDDPWGRVMLSSMYAKAQDWIGLARERREMNSMQVKKTPGCSSIELKGEVHEFVAGGSQHPQYAEICSVLQDVEAQTNVG

SEQ ID NO: 56028 - protein, 257 aa, Oryza sativa
MAPSDDLVYMAKLAEQAERYDEMVEAMNSVAKLDEGLTKEERNLLSVGYKNLIGAKRAAMRIIGSIELKEETKGKESHVRQTAEYRRKVEAEMDKICCDVINIIDKYLIPHSSGAESSVFYYKMKGDYYRYLAEFKTGTEKIEVSELSLNAYETASKTAQTDLTPTDPIRLGLALNISVFYCEIMNSPDKACQLAKNAFDEAVAELPSLSEENYKDSTLIMQLLRDNLALWNSDMADDADDIRERTDTTGAKGDPAA

SEQ ID NO: 56029 - protein, 484 aa, Oryza sativa
MASAERSKKLRVLLMPFFATSHIGPCTDLAVRLAAARPDVVEPTLAVTPANVSVVRSALRLHGSAASTVVSIATYPFPEAAGLPPGVENLSTAGDERWRVDAAAFDEAMTWPAQEALIKDQSPDVLITDFHFSWNVGIAEELAMPCVQLNVIGLFSTLAVYLAAAVVNDSDSEELTVAGFPGPELRIPRSELPDFLTAHRNLDLVDNMRKLVQVNTRCHGFAVNSFLFLDKPYCEKFMCNGFAKRGYYVGPLCLPQPPAVASVGEPTCISWLDSKPNRSVVYICFGTFAPVSEEQLHELALGLEASGKPFLWAVRAADGWAPPAGWEERVGDRGLLVRDWVPQTAILAHSATAAFLTHCGWNSVLEGVTAGVPLLTWPLVFEQFITERLVMDVLRIGERVWDGARSVRYKEAALVPAAAVARAVARFLEPGGAGDAARIRAQDFAAEAHAAVAEGGSSYGDLRRLIDDLVEARADDGESALQPL

SEQ ID NO: 56030 - protein, 405 aa, Oryza sativa
MGDSGNASHRDHTIDILRNDATFPSTSHQDNHNNLDELHQTRGPLNDVPHVPESSASATPASISRNASFARRDQGHRQPNPLNSGFWISIELIVSLSQIIAAITVLSVSRNEHPHAPLAQWLIGYTIGCVATLPHLYWRFLHRNRQNTEQESTNQVSSERDVYEPNSYVVVSSAHGSEVVDSGNNGGVARIASPRVYALVACFKLALDCFFAVWFVVGNVWIFGGRTSLHDAPNLYRLCIVFLAFGFIGYALPFILCTMICCCLPCIISMMGIHEDLDFNRGATAEAIDALVAYKFQSKKFQDGEAGEDNGGVLAAGTDKERTISAEDAVCCICLSKFSNNEDLRELPCNHVFHLECVDKWLKINALCPLCKADLGGSTNAPDSSSRSSHDSNNSRVRNDVESQQ

SEQ ID NO: 56031 - protein, 607 aa, Oryza sativa
MDLRRPTTRSSSGGVEPRYRQVGFFTTTAEPAAAAASSSSSPRGSDVYPGSLSPVMIPPPRIPDHLTALSPAPVSLLPSSPPPPSSSRLDAAESDLDDDDDDDVDVSWARPPPPALLESKEGLPDTQNEGAPAPAPVQQKQKLSKAERRAIQEAQRAAKASAKEAGLSRKSVATVSTSNAAMSKQLKTVKTPPKKDLPQLTPPVASEKKTSEHPPDRDRKKDVPPPRMQFDNVHRVEKTKKHSLVNQAEAQNRVELFRHLPQYVHGTQLPDLESKFFHLDLMHPSVYKVGLQFLSGVISGGNACCVAMLLAFREAIKDYSTPSTKTLNRDLTAKISSYVSFLIECKPLSISMGNAIRFLKNRIAKLLLTLSESEAKASLQSDIDRFINEKIIIADHVIVSHAIAKVRDDDVLLTYASSSVVEMIFDHANELGKKFRVVVVDSRPNNEGQALLHRLVAKGISCTYTHINAISYIMHEVTRVFLGASSILSNGAVYSSVGTAAVAMVAHAFGVPVLVCCEAYKLHERVQLDSICSNELGDPDVISRVPEREDLCHLKNCTYNENLQLLNLKYDTMPSDYVSMIITEYGMLPPTSVPVIVREYRREHIWI

SEQ ID NO: 56032 - protein, 312 aa, Oryza sativa; identical to SEQ ID NO: 47919

SEQ ID NO: 56033 - protein, 124 aa, Oryza sativa
MVETHRSTTTAASKYSSLSPSSSAAKQRRPRPQRAPVRARMRWRPREEEIAGGHSGGVNLPGTCSFLMAFSTALHSQWILLRSACALTPVCWSLVKKCQVYFLPFPLPLMILLCFVATMEQSIW

SEQ ID NO: 56034 - protein, 394 aa, Oryza sativa
MPNKKKRSAEDAALYVESLLFGDDPSDSEADVDKYDASDLKGAINKDGSSDEEDFTEEGLSAKEVALSISKSIVSLISSVDGKVLFTCSGTMVDHVGSATWILTSATLVRKCDNDYDAYQEGDVKIEVLLHNKTITEGFLAMCSLQYNIAVVTIEPQFDLPLVKLHDVPVCYSMLCRPVIAVARNFKSKTLLVRCGEMTRERSELDCDELLVCTCPVSKVFIGGLVMDLERRILGITFYDKDTVPFLPIEIAVRCLEHFKNFRTLKQPSLCIRGLGIHELEICNLEKICYMYPELSSGSGIVVEKISEVFPENCSSIEAGDIICSVDDIVLYSLYQLTSIFLDKMAAAMPTQDKVTVQAEIRRPRDNTKFVAKLNIGIACGEHNNCFNNRWPLQ

SEQ ID NO: 56035 - protein, 215 aa, Oryza sativa
MAGGVVIGVAPPAAAEEPEPHVERLPADLLAHVLSLIPSFHDLSMAGGVSRRWRRAVERSLAGRRRMSFAGQRTGDDSTARFVRAAVNLRDLDICWGCQITDQGLIRISTADCVKNLTSISLWGLAGITDNGVIQLVSRAHSLQHLNIGGTFITDESLYAVAKSCINLKVCFLIWKHFRVCKLNMTRYHIKKILEVNKYSVCSMYDVFTVVDTLK

SEQ ID NO: 56036 - protein, 360 aa, Oryza sativa
MGSSQKDKRTGRPKIWIYRDKVTNEPKGDATVTYEDPHAASAAVEWFNNKDFHGSTIQVHIAESKNKDMNDSSATASLNNSAELGGQDELDNGEGRGRGRGDGPGKAWQQDGDWLCPNTSCGNVNFAFRGVCNLCGAARPAGVSGSSAGGGGRGRGRGSDDARGGSRAAAAAAVGGPPGLFGPNDWPCPMCGNINWAKRMKCNICNTTKPGHNEGGVRGGRGGGYKELDEEELEEVKRRRKEAEEDDGEMYDEFGNLKKKFRAKTQQTENAPTLPGSGRAGWEVEQRGSTGREGKERSRDQGRDHDYDERDSRNRDRGSHGRERRRSRDREKERGRDTGRDHSYERSWERGTERDHDRYR

SEQ ID NO: 56037 - protein, 936 aa, Oryza sativa
MDMPTPSNRAGCNGNTGGTMGPSDDPYGAAAMNLDCYSEIYSPSVADQLFSLLNDPAAHRMFAMWPSMGSSPCAAGTSEDMPLDAYSGLGEAVEEPSQIMSVNPTEAEKTGKSSGELGSDDGAHQGSSMVPRSVVGSSLADRMLMALSLFRESLGSGALAQVWMPVEQEGHVVLSTCEQPFLLDQVLAGYREVSRHFVFSAKEEPGLQPGLPGRVFISGVPEWTSSVLYYNRPEYLRMEHALHHEIRGSLAMPIYDPSKDSCCAVFELVTRKEKPDFSAEMDNVCNALQAVNLKATKGSSNQKFYTENQKFAFTEILDVLRAICHAHMLPLALTWVPTSNGIDGGYVVGKDGASFSQSGKTIIRIHESACYVNDGKMQGFLQACARRHLEKGQGIAGRALKSNLPFFSPDIREYSIEDYPLAHHARKFSLHAAVAIRLRSTYTGNDDYILEFFLPVSCKGSGEQQMLLNNLSSTMQRICKSLRTVYEAEVDNVNAGTAAVFRKNNESCLPTGHTESSSHGDQSITGASFEDTSLANKPGVMEPELAEQVQPSSIGHAEKKRSTAEKNISLDVLRKYFSGSLKDAAKSLGVCPTTLKRICRHHGISRWPSRKINKVNRSLKKIQTVINSVHGVDRSLQYDPATGSLVPVVSLPEKLTFPSCDGLPTPSVGKTVEENSDLKSEEGCSLPDGSQRQSCQLQISDVKKSNEDEFHIGSGNSDFYGANATAKSNSEVTQGPLCPTGAFSALHLKGTDCTNPSSSLRPSSESTRNQIVGRNSPSIQQEDLDMLDNHEAEDKDHMHPSTSGMTDSSSGSASSHPTFKQNTRSALKDAASPALTVKATYNGDTVRFKFLPSMGWYHLLEEIAKRFKLPTGAYQLKYKDDEDEWVILANDSDLQECVDVLDSIGSRIVKLQVRDLPCIVSSSGSSTCLQLAAHSS

SEQ ID NO: 56038 - protein, 62 aa, Oryza sativa
MKMDRWVTEPLGDSWLLATWRATWYITHYREKRMLVEMEELLCFFTVEHHYHRIWRLIWSSG

SEQ ID NO: 56039 - protein, 484 aa, Oryza sativa
MASLADSFLADLDELSDNEAYPEEENAEAVGMDEDGGEDMLDLESLNYDDLDSVSKLQKTQCYNDIMQKVEDALQKGTDFSNQGSILEEDPEYQLIVDFNALSVDIENEIIIIHNFIRDKYRLKFPELESLVHHPIDYARVVQKIGNEIDLTLVDLEGLLPSAIIMVVSVTASTTNGKPLSEENLAKTIEACERALTLDAAKKKVLDFVESRMGRIAPNLSAIVGSAVASKLMGTAGGLGALAKMPACNVQLLGAKKKNLAGFSSATSQFRVGYLEQTEVFQSTPPALRTSTCRLIAAKSTLAARINSIRGDPTGKAGRNLLEEIRKKIEKWQEPPPAKLPKPLPVPDSEPKKKRGGRRLRKMKERYAQTDMMKLANRMQFGVPEESSLGDGLGEGYGMLGQAGSGKLRVSAAQSKLAAKVAKKFKEKSYGSSGATSGLTSSLAFTPVQGIELSNPQSHGNLLGSGTQSTYFSETGTFSKIKRN

SEQ ID NO: 56040 - protein, 396 aa, Oryza sativa; identical to SEQ ID NO: 33294

SEQ ID NO: 56041 - protein, 604 aa, Oryza sativa
MHHQQLKPGEAASLPRHLLEAHVVALVRRCCPGLLALRAAHARLIRLRLPRLTAAFALSKLLASSSSSSSSSCGAAPSYARNLFDQIPEPTAFCYNSLIRALSSAAGAAPAADTVLVYRRMLRAGSPLPNSFTLAFALKACSVVPALGEGRQLHSQAFRRGLEPSPYVQTGLLNLYAKCEEVALARTVFDDMVGDKNLAAWSAMIGGYSRVGMVNEALGLFREMQAADVNPDEVTMVGVISACAKAGALDLGRWVHAFIDRKGITVDLELSTALIDMYAKCGLIERAKGVFDAMAERDTKAWSAMIVGLAIHGLVEVALKLFSRMLELKVRPNNVTFIGVLSACAHSGLVNEGRRYWSTMQELGIKPSMENYGCMVDLFCRSSLLDEAYSFVTGMAIPPNSVIWRTLLVASKNSNRFDIVQSASKKLLELEPCNPENYVLLSNLYASNSQWDRVSYMRKKMKENNVNVVAGCSSIEINGYLHKFVVSDDSHPEIKEIRLLLREIADRVVRAGHKPWTAAVLHDVGEEEKEVALCEHSERLAIAYGLLKTKAPHVIRVVKNLRFCPDCHEVAKIVSKSYDREIIVRDRVRFHRFVEGSCSCKDFW

SEQ ID NO: 56042 - protein, 485 aa, Oryza sativa
MSMPMPILLLLLLLPQGQGHGGAGDICIVGSGISGSSTAFFFTNYTTALSGAQLRVFERRAKVGGRLATVTVSGDHFEAGGSIIHPRNLHVRRFADLLGLEAKTDGDDDWLGIWDGHRFVFQTLRPLPPGTSWLRRKLHTLVNSLRLFKRYGLSLLKMDRFVQEMLQRFMLYYNGFESRPVFDTVEEMLKWSGLYGLTRRTLEAELLDAGLNSQTISELVTVITRINYGQSVSISGLAGAVSLAGSESGLWAVKGGNWQLAAGLLEAANATLHLQEGIDSIEYAGDHYILKSNKGLEYNCVATVVATPLDEVNITFSPPISIPARKTQHTHATFVRGILNPKFFGLSSVSDIPKLIGTMEVPEIPFSSISILKKYSEQDMTYKVFSRVKLNESLLDQIFSGRKETIRINWPAYPHYEAPEVFAPIILDGKQLYYVNTFESAASAMETGAVAAENVARLLIARLRLPLPSRPAAPAPDHHDQRADL

SEQ ID NO: 56043 - protein, 249 aa, Oryza sativa; identical to SEQ ID NO: 30229

SEQ ID NO: 56044 - protein, 258 aa, Oryza sativa
MKIIPVACLEDNYAYLIVDESTKSAAAVDPVEPEKVLAAAAEVGVRIDCVLTTHHHWDHAGGNEKMAQSVPGIKVYGGSLDNVKGCTDQVENGTKLSLGKDIEILCLHTPCHTKGHISYYVTSKEEEDPAVFTGDTLFIAGCGRFFEGTAEQMYQSLCVTLGSLPKPTQVYCGHEYTVKNLKFILTVEPDNEKVKQKLEWAQKQREANQPTIPSTIGEEFETNTFMRVDLPEIQAKFGAKSPVEALREVRKTKDNWKS

SEQ ID NO: 56045 - protein, 72 aa, Oryza sativa; identical to SEQ ID NO: 30028

SEQ ID NO: 56046 - protein, 146 aa, Oryza sativa
MVKLTMIARVTDDLPLVEGLDDGRDLRDADFYKQQAKLLFKNLSKGQHEASRMSIETGPYLFHYIIEGRVCYLTMCDCSYPKKLAFQYLEDLKNEFERVNGNQIETAARPYAFIKFDTFIQKTKKLYLDTRTQRNLAKLNDELYER

SEQ ID NO: 56047 - protein, 510 aa, Oryza sativa
MAVMEEQQEGAAGVMRRRPKTKIVCTLGPASRSVEMIGRLLRAGMCVARFNFSHGSHEYHQETLDNLRAAMESTGILCAVMLDTKGPEIRTGFLKDGKPVQLKKGQEITVSTDYSIKGDDNMISMSYKKLAVDLKPGSVILCADGTITLTVLHCDKEQGLVRCRCENTAMLGERKNVNLPGVIVDLPTLTEKDKEDILKWGVPNKIDMIALSFVRKGSDLVEVRKVLGKHAKSIMLMSKVENQEGVANFDDILAQSDAFMVARGDLGMEIPIEKIFYAQKVMIFKCNIQGKPVVTATQMLESMIKSPRPTRAEATDVANAVLDGTDCVMLSGETAAGAYPELAVRTMAKICLQAESCVDHAAVFKSITASAPIPMSPLESLASSAVRTANSAKAALILVLTRGGTTARLVAKYRPSMPILSVVVPELKQTDSFDWTCSDEAPARHSLIVRGVIPMLSAATAKAFDNEATEEALGFAISNAKAMGLCNSGESVVALHRIGTASVIKLLTAN

SEQ ID NO: 56048 - protein, 294 aa, Oryza sativa; identical to SEQ ID NO: 43498

SEQ ID NO: 56049 - protein, 884 aa, Oryza sativa
MAGQMLPPIALVAVAICITAAAAAKVPAIYVFGDSTADVGNNNYLTGAAVPRANFPHNGIDFPTSRPTGRFSNGYNGVDFLALNMGFRRSPPPFLAALQKLSLASNGLTGQVSSRLRGLTNLTSLDLSVNRFTGHLPDVFADLTSLQHLTAHSNGFSGLLPRSLSSLSSLRDLNLRNNSFSGPIARVNFSSMPFLVSIDLTTNHLNGSLPLSLADCGDLKSLSIAKNSLTGQLPEEYGRLGSLSVLSLSNNTMRNISGALTVLRACKNLTTLILTKNFVGEDLPDDGIAGFDNLEVLALGDCALRGRVPEWLHQCKRLEVLDLSWNQLVGTIPEWIGQLDNLTYLDLSNNSLVGEIPKSLTQLKSLVTARRSPGMAFTNMPLYVKHNKSTSGRQYNQLSNFPPSLFLNDNGLNGTIWPEFGNLKELHVLDLSNNAISGSIPDVLSRMENLEVLDLSSNNLSGSIPSSLTDLTFLSKFSVAHNHLVGPIPNGGQFFTFSNSSFEGNPGLCRSSSCDQNQPGETPTDNDIQRSGRNRKNKILGVAICIGLVLVVLLTVILVNISKREVSIIDDEEINGSCHDSYDYWKPVLFFQDSAKELTVSDLIKSTNNFDQANIIGCGGFGLVYKAYLPDGTKAAVKRLSGDCGQMEREFRAEVEALSQAQHKNLVSLRGYCRYGNDRLLIYSYMENNSLDYWLHERSDGGYMLKWESRLKIAQGSARGLAYLHKDCEPNIIHRDVKSSNILLNENFEAHLADFGLARLIQPYDTHVTTDLVGTLGYIPPEYSQSVIATPKGDVYSFGVVLLELLTGRRPMDVSKAKGSRDLVSYVLQMKSEKKEEQIFDTLIWSKTHEKQLFSVLEAACRCISTDPRQRPSIEQVVAWLDSV

SEQ ID NO: 56050 - protein, 163 aa, Oryza sativa
MRDGDHRRAGGRCRRHRRCEAAAQQWTEPAGVFQPRLWRRRAEPPPASRPASKTNPTCCTPPLASLHTVRPTPRRRPRGSRAPLMFTSPVKVVPRAACSMKCPSGTGHALCGCGIGGQARRSARSVPKAVQKDEMFDKVVEAALDCRNVQEWEEDVWRVRMPA

SEQ ID NO: 56051 - protein, 358 aa, Oryza sativa
MLARGAVRSLFDRLRPPPHHRRRRSSPAAIMPAAAAAHRGCFCSLSHSNLCGEGSVIQRKGFLDLGMGRRFAPGSALGSKGCLNWQDRGRSKRGVDGGEAVRIKAQVLAPQRQLLHDPEVLPLEEVATKSLNGNGACRRGKPLGFPENAAPTKMVVAVDVDEVLGSFLAALNKFIADRYSLNHSVSEYHVYEFFKIWNCSRERANFLVHEFFTTHYFQDGIHPIPGARDALQNLSSFCSLSVVTSRQDAIKNHTLDWIDKYYPGLFEQIHFGNHFALQGQSKPKSEICRSFGAQVLVDDNPRYALDCAEDGMRVLLFDYHNSYPWCKTGVDESHPLVTKVHNWQEVEEKLLSWVVPEF

SEQ ID NO: 56052 - protein, 482 aa, Oryza sativa
MEDYFSRILDLAWQLRHQLTRLIEHVFGYIDWIPEHHGFQFSPCYKRSLPATERYIRGEAPLLSVSNSTEDQTPNGLSEAIVVRKGLSSICQRFPSFLHDFRLGQQLAFHLRELCSAVASEIHAKLARFLHRFWTTLQGSSKDIGWLKRTKTLPCSVDGTDRFKELLYGIRNGMHHLPNTLVYLFIPGLFSNHSPLYFVNTKRIFSKMGLTCHIARIHSEASVEKNARELKLYIEELYWGSGKQVLLLGHSKGGVDAAAALSLYWSELKGKVAGLALVQSPYGGTPIASDILRKGQIADKETRRIMELIICKLIKGDIRALEDLTYDKRRDFISKHKLPVDELPIISFHTEASTAPTMLVTLSRVAQAELLPWLPLPRFLSSSEYAESLLASLKLPVVVPASAAMAVSALHLRLRYGERSDGLVTRRDAEVPGSVVVRPERRLDHAWMVHSTLRKDHAEADATQMCEALMAMLVEIGRKKCC

SEQ ID NO: 56053 - protein, 409 aa, Oryza sativa
MAAAAADFAASKRAMAYALCKHLSLDPNTISSTSIEESDIATLFSHIVKSSEDEVLKWVEFSSNFVGKCGEQHALLGNLNQDLSQKSVLLGNGFKPSVADIVVFATIQVFVSHLGENELQKYPHVLRWMDYIQNIVDFGTTVQKVNLTKSVFDPPSHPKKADKGDTDPSSKKVVSGQKNVGKSDANVDSKKAAPENKAPENKANPTPAKNNKPSGDKKKAQEKSAGKPNEGVADKAPQKTAEKDSECNVSILNIQVGLIRKAWKHPSADSLLVEEIDLGDGNVHQVVSGLAKFFSPEELVNRHVVLITNVKPGKLRDVMSAGLVLCASNQDHTVVEPLIPPEGAKPGERISFAGFDGKPEDVLNPKKKQLDKITPDLHTDGNGIATYRGVPFTTSAGPCRSSVPNASIK

SEQ ID NO: 56054 - protein, 580 aa, Oryza sativa
MDDDFEMPPPGADDDLMMGEDGMGDFGGADGPPLKVGEEKEIGKQGLRKKLLKEGEGWETPEVGDEVEVHYTGTLLDGKKFDSSRDRGTPFKFKLGQGQVIKGWDLGIKTMKKGENAVFTIPPDLAYGESGSPPTIPASATLQFDVELLSWTSVKDICQDGGIFKKILKEGEKWENPKDLDEVFVKYEARLEDGTVISKSEGAEFTVKDGFFCPALAKAVKTMKKAEKVLLTVKPQYGFGENGRPAAGEEGAVPPNATLLVNLELVSWKTVTEIGDDKKILKKVLTEGTGYERPNEGAVVKVKITGKLQDGTIFTKKGHDEPEPFEFKTDEEEVIDGIDRAVLNMKNGEVALVTIPPEYAFGSTESKQDLAVVPPNSTVIYEVELVSFVKDKESWDLNNTEKIETAGAKKEEGNALFKLGKYVRASKRYEKAAKFIEYDSSFSEDEKKQSKQLKVTCNLNNAACKLKLKDYKQAEKLCTKVLELDSQNVKALYRRAQAYMQLADLELAEVDIKKALEIDPDNRDVKLTYKNLKEKVKEYNKKDAKFYSNMFAKMTKQPAEDGKAGSGAESKQGSEPVTAA

SEQ ID NO: 56055 - protein, 330 aa, Oryza sativa
MADARSAPESLPPAFLEFLQENGLDPMMYSMVDTIPRYIRLKPGMEPHIPEIQSELTCHLNKVSWLPDFYAIPPQVQIASSMAYQQGKIYGIDAASGAAVLALDVQPGEHVLDLCAAPGAKLCMLADMLGGRGSLTGVDVAKHRLAACRTMLQKYSLGDRCRLFVADGTSFSILPVNSSLGNGEGSTCHKDNGSTLSEWTSKRSWKDRQKSKKARMAGSPHLTSTSEPELIYYGKHSGLVGLRKCDAIRPSADDEAQTSGYDKVLVDAECTHDGSIKHIQKFEFWGWKTLDRRVLDAERTDDLLHLQLRLLTNGFKLLKTGGSLVYSTCR

SEQ ID NO: 56056 - protein, 523 aa, Oryza sativa
MMSGSESQQEREHRQQQEMNISFGMMMNHGHHHYGQHQQQHHHHPPPSSSSSSSMHAAAASFMSSKEASAGAYDHLGELDQALFMYLDHGSHAASHQEQRQTLNIFPSQPMHVEPSPKGEISLVLSPAAVGTKMARSPDHHHHHQQQAAAAMEELATGSRRQDHHHLQHQPFAAEPAGINRDVKPVTAKKDHRRGVSTGERDPKTLRRLAQNREAARKSRLRKKAYIQQLESSRIRLAQLEQELHTARAQGVFFPGSGGLIGEGGSGKGVLLGGIDGVGGGGGGGLSSEAAMFDVEYGRWQEEHHRLMYELRAALQQQLPEGELQVYVESCLAHHDEVAAIKDGAIRGDVFHLISGVWMSPAERCFLWLGGFRPSEVIKMLVAHVEPLTEQQIVGVYGLQQSALETEEALTQGLDALYQSLSDTVVSDALSCPSNVANYMGQMAVAINKLSTLEGFVRQAENLRQQTLHRLQQVLTTRQMARSLLAVSDYFHRLRTLSSLWVTRPRHPPHDHQPPPHSAAPHT

SEQ ID NO: 56057 - protein, 480 aa, Oryza sativa
MVGKELVVRKNGPVDIREIAAKATLREVRQNGHTYVELRRVGKRVIFFCTICLTECFSDTVLFDHLKGNLHSRRYAEAKVTLFGPMPWPFNDGVLFFNNSREKDPLLLDSSSQNTRELALVPANDTEVTSRLRDDSSSRNGAKGTRRGANAHGNGRTASVSEDHVLSNQSGTDGPLVIPSVLLKDVVSDLPVHLLGYGNIAYRLWEASKGSKKISKIWCAWVGQDGSHGLDECDTYEQSDFAIVNFSYTIELGRKWSSDDQDLPISAGSFFVIDDAGHRGKRRKKSFSDQEASSEESNEQSSSAHDNSQAIITGSPTGTSHNLQVGLLSTKSMRRELRKQKRLAAEKACDICGRPMLLEKDVATLLNCKTGNLACSSRNSSGAFHLFHTSCLVHWTILCQYEMLADKITSKGKSNRGRKAKNAPKKITSILCPECQGTGIHVEGDELEKPTISLSEVQTSECYSSLLLFFNWTCFNYLLC

SEQ ID NO: 56058 - protein, 399 aa, Oryza sativa
MPTVTCNACNAGFDDEEQQRLHYRSEWHRYNLKRKVAGVPGVTEALFLARQTALAEGSNSDSTPMLYSCALCGKEYRSSKAHAQHLNSRSHLMKASQEPNASIAGITIVKPRPERVQRRAPSAVEEDEDEDEEEEWVEVDPSELESTSEMQVDEHSSKSDDEIDEFEELDPTFCFMCDLEHDTIENCMVHMHKKHGFFIPDSEYLKDPNGLLIYVGLKVKRDFICLYCNDRCQPFQSLEAVRKHMDAKGHCKVRYGDGGDDEDADLEDFYDYSSSYADVEGKELVAADDKDNIELGSGGAELVITNKSEKGTRVRTLGSREFIRYYRQKPRPSVATDRALALSLASSYKSMGLVTVQSKEQVVRLKVLRAMNKTGVETMRTKIGMKSNVIRNLPKNCPY

SEQ ID NO: 56059 - protein, 273 aa, Oryza sativa
MAETPERRRYSGSPSPYRGNPKSRSRSRSPAARSQSRSPVPDPRSQARSRSRSREREPDAVNHGNTLYVTGLSSRVTERELKDYFSKEGRVTSCHVVLEPHTRVSRGFAFVTMDTVEDAERCIKYLNQSVMEGRNITVEKSRRGRPRTPTPGSYLGHRYDRREPRGRYRSRGGGYGRDEYYGNSYRRSPPPMYPSYRDTRDYPPYRDTRDYSPHRDARDYYDGRGGRGYSPHRSPPYGGGRARRERSRSLPYSPYRMPERGYGRQAGGGGYDR

SEQ ID NO: 56060 - protein, 594 aa, Oryza sativa; identical to SEQ ID NO: 54974

SEQ ID NO: 56061 - protein, 79 aa, Oryza sativa
MQQFARAGATRSTRSAWLSSEVCPNRAFLRSLAGDRFLHALGLAGRSMQATNKDNYMKEAPLYLELGSTFLLAEMVNME

SEQ ID NO: 56062 - protein, 687 aa, Oryza sativa
MAAARACPMGVSVDQRRAAVAVLRAAAAAGELSLGKAVHARVVRAARFDVVQYNNLIALYVKCGRLGLARQVFDAMPSRNPVSGNLLMSGYASSGRHRDALALLRVADFGLNEYVLSSAVAATAHVRSYDMGRQCHGYAIKAGLAEHPYVCSAVLHMYCQCAHMDEAVKVFDNVSSFNVFAFNSMINGFLDRGQMDGSTSIVRSMVRNVGQWDHVSYVAVLGHCASTKEVVLGSQVHTQALKRRLELNVYVGSALVDMYGKCDFPHEANRVFEVLPEKNIVSWTAIMTAYTQNELFEDALQLFLDMEMEGVRPNEFTYAVALNSCAGLATLKNGNALGACTMKTGHWGLLPVCNALMNMYSKSGSVEDARRVFLSMPCRDVVSWNSIIIGYAHHGRAREAMEAFHDMLFAEEVPSYVTFIGVLSACAQLGLVDEGFYYLNIMMKEVGVKPGKEHYTCMVGLLCRVGRLDEAERFIESNCIGTDVVAWRSLLSSCQVYRNYGLGHRVAEQIFQLKPKDVGTYVLLSNMYAKANRWDGVVKVRRLMRELGVRKEPGVSWIQVGSEVHVFTSEDKKHPYMEQITKKLQELIDKIKVIGYVPNIAVALHDVEDEQKEEHLMYHSEKLALAFGLIRTPKGEAIRIMKNVRICDDCHVAIKLISLATGRRIVVRDTVRFHCIEDGVCSCDDYW

SEQ ID NO: 56063 - protein, 554 aa, Oryza sativa
MITVVDLYHVLTAVVPLYVAMTLAYASVRWWRIFSPDQCSGINRFVALFAVPLLSFHFISTNNPFAMNLRFLAADTLQKLIVLALLALWCRLSARGSLDWLITLFSLSTLPNTLVMGIPLLKGMYAAAADVDSGSLMVQIVVLQCIIWYTLMLFLFEYRGARLLVMEQFPDTAASIVSFRVDSDVVSLAGGGGGAAELQAEAEVGDDGRMRVTVRKSTSSRSEAACSHGTQSHSQSMQPRVSNLSGVEIYSLQSSRNPTPRGSSFNHAEFFNIVGNGKQGDEEKGAAGGGGHSPQPVVGKRKDLHMFVWSSSASPVSERAAAAAAGAVHVFGGGGADHGDAKGAQAYDEYSFGNKNEKDGPTLSKLGSNSTAQLRPKDDGEGMAAAMPPASVMTRLILIMVWRKLIRNPNTYSSLLGVIWSLVSYRWGIEMPAIIARSISILSDAGLGMAMFSLGLFMALQPRIIACGNSLASYAMAVGFLVGPAVMAAASIAVGLRGVLLHIAIVQAALPQGIVPFVFAKEYNVHPNILSTAVIFGMLIALPITLVYYILLGL

SEQ ID NO: 56064 - protein, 506 aa, Oryza sativa; identical to SEQ ID NO: 54511

SEQ ID NO: 56065 - protein, 306 aa, Oryza sativa
MEAVRASAAWVASRSSHVKVDMLEVEKVVDKIQGNVPKVEWDFEGIHYFDDGPLTVQYLFVLDALNFCFWPDKDLSYDHLASGLKLALEKDKTALDADRLQSYTGPQLRQLLNWPRPLPIEEERVRLLHEVGMELERSFGGEAANLVKSAGNSAATLIELITRHFPGFRDHSLYKGHQVFLYKRAQIFVADLWGAFKGQNYGEFHDIKSITIFADYIVPAVLRELGILKYGSNLSCSIDSSSEIVPGSEEEVEIRACSVYAVEKMRELINKKFGKQLLSIDIDLWLWSCGVQNMALSHHRTLSIYY

SEQ ID NO: 56066 - protein, 777 aa, Oryza sativa
MRWWKRSVSPSPSPSSSSASASTPASPARASTSRVGGGVPSRRRDVVGFGWGGGSDPQPRLTRQRRLRHVDDIEVGVSALGLDSSPSPAAPSSCPSSRDSVGFGLLTASSTPISRTASNMEVAPPRSSSSPVLLPHPLPLPDEGDSPCRGSGRSLPSPKLFEGDCNGSAVESNLLGVSEIGSDRASLFPRVMAKTVQKNPEHGDLRSNGTNGINCGQRRKAFKEKLQDKSSAETLTFRLNIPAKSAPSSGFSSPVQSPRRLSSVDFLSTATSTQGANLSSAQSVWSPDLYGSSPRCASPEKIMGSQERSPRSNPLRSPVLRSKNPSAPPSPMHPKLFPENHVSRPEGNGSVNFHPLPLPPASVSPKQTNFSHQPVPKVDAPSMAGQWQKGKLIGSGTFGCVYEAANRHTGALCAMKEVNIIPDDAKSAESLKQLEQEIKFLSQFKHENIVQYYGSEYIEDRFYIYLEYVHPGSINKYVNQHCGAMTESVIRSFTRHILKGLAFLHSQKIMHRDIKGANLLVDVNGVVKLADFGMAKHLSTAAPNLSLKGTPYWMAPEVVQATLVKDVGYDLAVDIWSLGCTIIEMFTGKPPWSGLEGPAAMFKVLHKDPSIPDSLSPEGKEFLRCCFRRNPAERPTASKLLEHPFVHNSNNFNQHSALHSPTGLKSTDTGHNARDKKSCKIVSCMRGKNMITTGETSSARSPGSLSNRVAVGLTALPNLETRSLSPTPMSLRSSPGSAAHTPSMHFSIAYHQPSPLPRPNGKEAINLFTLKHDELPT

SEQ ID NO: 56067 - protein, 245 aa, Oryza sativa
MWLVAAQFEIRQRNLKAARQILGNAIGMSPKGKIFKKYIEIELYLGNFDRCRTLYEKYIEWSPANCYAWRKYAELEKNLSETDRARSIYELAIAQPALDTPEVLWKEYLQFEIDENEFDRTRELYERLLDRTKHLKVWISYTEFEASAGLAGEDGESEEIKKEVSYHEQQIERVRRCRAIFERAFEYFRTSAPELKEERAMLLEEWLNKEVSFGDLGDVTLVQKKAPRKVKRKRPIPTEDLHCCV

SEQ ID NO: 56068 - protein, 371 aa, Oryza sativa
MFAMTSMGVNIINSINDGHGPYIFKISGQLCHRIGSLIPKHGARPEYCQLYIFDTENEIRNRVAVASHREMSFEPNEDIVASLMTMLNAHNPVVQLFRTARDRLHDQLEDHYSVKLFATPNEHGNIYSAPVASEVVGLMVNDIGTTEKGRDLIVEDHSLQLQRVNETHCKFMAMQYPLLFPYGEDGFHENLKYRQCHRSGMIKRKKVSLVEYFAYRLHDRDDDFNTPLRCKRLTQSYEVDGFCCVKDSRLNHYRKKKTFQLKYRSSPYKALLDTVSSGIIDASSVGQRIILPGSFTGSPRYYYQNYQDCVALCRRFGCPDLFITYTCNAAWPEITEALAFIPGQQPSDRPDIVDRVFEMKLKLFVDDIKKI

SEQ ID NO: 56069 - protein, 482 aa, Oryza sativa
MMGSRVAAALLRRGRDQASSLMAARLPRGAPAPSPAAPRVGSGSVCGCGGGGGLLTGSRSTGSVFSASRLASFHAFRSIGSKTLMGQCTRKMTTTVAAMNSGVANAAAYSGLKLLVTKGPQAQKAIGIWLFGCATWVFGLVILGGVTRLTRSGLSMTDWKFTGSLPPMSDEEWLLEFEKYKLSPEYKRVNKGMSLGDFKFIYWMEYGHRMWGRALGFLFSVPFAYFIAKGYVTRQLGLRLSGLFALGAGQGLIGWWMVKSGLEEPASEYVQPRVSPYRLATHLTSAFVIYCGILWTALSVVMPEPPAGSMNWVNSAAKIKKLAIPVSAVVGITAISGAFVAGNDAGHAYNTFPKMGDTWIPEDVFAMEPFIRNFFENTSTVQLNHRILATTTLLSVGGLWLAARKVDMHPAIKSLIGSTLGMAALQVTLGISTLLMYVPTSLGSAHQAGALTLLSLMILLTHTLRRPSPALLKSLASAVKST

SEQ ID NO: 56070 - protein, 257 aa, Oryza sativa
MELPADGSALARQGSIYSLTFDEFQSALGSAEKDFGSMNMDELLRNIWTAEESQAIAPAAAAASAAAVVGDAQQQQQPIQRQGSLTLPRTLSQKTVDEVWRDIMGLGGSDDEDPAAAAAAAAPAQRQPTLGGDDAGGVPGAGRRRAGGHGADHRAAAAGAGVVPREQCGRPGHAARQRDAAWCRRRRPRRRRRDDGGGAGHAGGAERAGEGGGRGSLVALAGALPIRHRAQGEEGPYRREGGGEAAEADDQEQGVRC

SEQ ID NO: 56071 - protein, 151 aa, Oryza sativa
MKSLQGEVHLNIPASKAWEMFTNNETLGKISPEMLSGAEYLEGDGSPGSLRIFKLGPALHHFVKESVQKVEKVETGRSFGYEVVSGELKEVYDPYHVTFSFAPVPGKEGEQCVAGWKAEFEPITPTSPPPEKAKDAALGFLKLFETCEATN

SEQ ID NO: 56072 - protein, 184 aa, Oryza sativa
MSSTGEQSQAKAEAEEAVELVLFQVAECYVYLIPPRKTAASYRADEWNVNKWAWEGTLKVVSKGEECIIKLEDKNTGELYARAFLREDEPHPVEPVIDSSRYFVLRVEENIDGRQRHAFIGLGFRERPQAYDFQAALHDHMKYLNKKKTAEEMVQHYEKSSSVDYSLKEGETLVLQLKNVGLVG

SEQ ID NO: 56073 - protein, 247 aa, Oryza sativa
MASPPPPPPQPPSPSAATAGAAAAPVDALFLQNLMSRVQLRPPFLDTNSFLTQDLDEFLLNEFAALSAAAGASDDDDDGEDGEGEGSDGEVVSGEARRRRTLAREEAKLEQEIVRLVLAGEAEEALKPNSGQSVAVGDHHICVGFHDDSGGVYRVWEWHGHVMIFDDEDGYSAEYIYGNHFEPLAAATARAKEKEREKREKELSSGLRDLILGDTGSGANGSKENGKGGAPRVVRRNVVNAPAAPAR

SEQ ID NO: 56074 - protein, 79 aa, Oryza sativa
MKLGDLQRRLRQGNMDMRRISQIRILMRKEGFVRRGVTLQHKLLLLPKLPLLWLQPRLLVMPISKYKAPMQGPYFLYLS

SEQ ID NO: 56075 - protein, 374 aa, Oryza sativa
MSDGSVESPSLHRTPPPPSPSPSLSLSRSQQQTPRGRQPPPPGADPVAFAVVAFVAICFVLISFSAPSSILHQVPEGHVGVYWRGGALLETITPPGFHVKLPWITQFEPIQVTLQTDQVRNIPCGTKGGVMISFDKIEVVNRLHKEFVHETLLNYGVHYDKTWIYDKIHHEINQFCSAHSLQQVYIDLFDQIDETMKEAIQRDCTRYAPGIEIISVRVTKPNIPDSIRRNFELMEEERTKALIAIEKQKVAEKEAETQKKIALSEAEKNAQVSKILMEQKLMEKDSSKRQQQIDNEMFLAREKALTDANYYRITKEAEANRLKLTPEYLELRFIESIANNSKIFFGEKIPNMIMDQRMLRNYLDNGSTKDHLEI

SEQ ID NO: 56076 - protein, 416 aa, Oryza sativa
MAPPPHSDSDLLKPRDVCIVGVARTPIGALLGSLSSLPATKLGSVAIQAALRRANVEPALVQEVFMGNVLSANLGQAPARQAALGAGLPDTVPCTTVNKVCSSGMKAVMLAAQTIQLGMHDVVVAGGMESMSNAPKYVAAARRGSRFGHDVLIDGMLKDGLWDVYNDFPMGMCAELCADQHSISREEQDLYAIQSNERAIAARDSGTFSWEIAPVEISSGRGKPPLIVDKDESLAKFNSAKLRKLGPTFKKNGSVTAGNSSSISDGAAAIVLVSGQKAKSLGLQVIARIRGYADAAQAPELFTTTPALAIPKAVSNAGLQTSQIDYYEINEAFSVVALANQKLLGIPSGKLNLSGGGVSLGHPIGCSGARIIVTLLGILRHKNGKIGVAGVCNGGGGASALVVELMQPSLFTRSSL

SEQ ID NO: 56077 - protein, 64 aa, Oryza sativa
MTGKILITQLVLKLNHRLDQLRNHLSQFTNQLPNNQFHLNQENLLQLLYPRPLVPPIPPTPRHE

SEQ ID NO: 56078 - protein, 257 aa, Oryza sativa; identical to SEQ ID NO: 31722

SEQ ID NO: 56079 - protein, 115 aa, Oryza sativa
MNCIKIAMVVTLIIVPLALRGASLLGNAVAAAVVPSSSPEQQQQQQRRPRPPPGSKNGASPSSSAHGQHWKDQSRHAAFTRRRFGTGTGGGGDDGFFSDDKRFSPTGSNPLHNLR

SEQ ID NO: 56080 - protein, 632 aa, Oryza sativa
MGAPPTRESEARDEEAEVSRSGEQGGGEASTTQQQQQPVPLRHQLLGACRADERLRPLLTLNLSCGAAEDRFISHLSQHFEASEVGLLYRCLCVPLVALRVGKVDRHGPLLCPTPIRGKLSLGLLPSSSMCIIFAGDDGHSEQLALLNNDHEVSEVCVEEISADNTGRSFLIRISESKVFYYWCAEKSKKHGMDLLAKMKNLLQGRPTLSDLTGISDSRLDAFATHLHAYLVASSIGDVKSLGSLNDFLGASSPQDQYLQPSSVVSKSSRFCTSAANAAKASSVYQTSLSPRCGAFKDGVPRMSCAKIAGRDKLKRRGDWLSSSTGPDDANLLTPKIVSSDSASEKCGGDCSENSANSPPLDLPLSFPLLPSLFPLATQYPLPKDSTEQPFKPYYCWCPPCPSSLQYSVTPLHMPVTSVEPLPLPPLSSLLSNDQPPTSTVSAKMDTTDLPSLNLPSILRDPLLHLPLPTSPLVSLHGSQVPTFTPLMSDPIVHVPVIDVCSSGQAYLVSCGPSMSATVTLLPSLKPLIPETESLVERSARETLMRLIASTPSASNPQLVNILPAVLTDVPEMNVRKHLGVHPGDRLSSSCSVDVIGPGFAVTEDDASVGDGAHATFAEYDDIGDQQHFQSM

SEQ ID NO: 56081 - protein, 520 aa, Oryza sativa
MRGAGFLLLVVFAVAVAGGAVAAAADLDGGDGGGGVAAEWRFPSSRMRDAYVALQTWRREAIFSDPGNLTADWVGPDVCNYTGVFCAPLPWDRREVAVAGVDLNHGDIAGYLPPELGLLADLALLHLNSNRFCGVLPATLRRLRLLHELDLSNNRFVGRFPEVVLDMPALRFLDLRFNDFEGGVPRQLFDRPLDAIFLNHNRFRFDLPDNFGNSPVSVIVLAHNSFGGCLPASLGNMSGTLNEILLINTGLSSCLPPEVGMLREVTVFDVSFNRLAGPLPSAVAGMRKVEQLDVAHNLLTGAIPQAVCELPRLKNFTFAYNFFTGEPPSCAHAVPRYGDRRNCLPNRPAQRTLRQCAAFFARPPVNCAAFQCKPFVPALPPPSPPPPSPPPPSPPPPSPPPPSTSPPPPSPPPPSPPPPSPPPPAPIFHPPQPPPPPPPPAPQPHPPCPELPPPPPPPPPCGGATPALSPPPPPPYYPGPWPPVHGVPYGSPPPPPLQHHSSWPPIHSVPYGSPPPPPLH

SEQ ID NO: 56082 - protein, 187 aa, Oryza sativa
MPPLTGPKSGDALFGSVERVNAELFTLTYGAIVRQLLTDLEEVEEVNKQLDQMGYNIGTRLVDEFLAKSNVSRCVDFKETADVIAKLGFKMFLGVTATVTNWDAEGTSCSFVLEDNPLVDFVELPDTCQGLQYCNVLSGVIRGALEMVSMKTEVTWVRDMLRGDDAYEMRVKLTKQVPEEYPYKDDD

SEQ ID NO: 56083 - protein, 68 aa, Oryza sativa
MNSTSCVTNFFNIFYIFFQIRRMVKVLNTNIYGCTYFGTYFGTEVVRAANSWRFICGQCAVSLLRWNP

SEQ ID NO: 56084 - protein, 124 aa, Oryza sativa
MAAAAAAATATLRWVLQMHRDVPRAARFYSEGLDFSVNVCTLRWAELQSGPLKLALMHTNDSNLASQRIYSSMLSFTVPDINSTVTKLLSLGAELDGPIKYEIHGKVAAVRCIDGHMLGLFEPA

SEQ ID NO: 56085 - protein, 629 aa, Oryza sativa
MESFRRFLNPLVLNLQKMELELTCPVCLKLLNAPTMLPCYHTSCSKCATTRTMDGYSCAICKSAYRSQDLRPASHLEAIVNIHRSLSSTVSSMVTQQEAQADIPVAKTSFQGTPESGNRNGAEKSDQVKSYTPVASKLAYNQSTGLAYGNVDGVKERNPALETRGAADVTAMPTILVQKGPCRSQSSDGPRDLDCDSNDLEGELITSRSSPQSVLKREPNTANDDNRELKRQKSTDQDDRQPAVAGAWKCEFCHSSKTTESTGPLSHYLHGEPLEDNQAWKPNVLHVHEKCIEWAPQAFFTGDIANNLEPELARASKIKCSVCGLKGAALGCLVKSCRKSFHVPCAHGISGCRWDDENFVMLCPSHSSKKLPCERSKSKNKKTSLQRSSSDTMLDDLNSPSTIHMDGLWTASPFLTSEWVICGSALSSQEKEILDQFEHQTGITVTNGWRSNVTHVIANTDECGACARTLKVLMAILAGKWVLNINWLKACMEAKEPVPEEPYEISSDVHGSFDGPRMGRLRAMQNAPHLFAGLTFYFSGHFMPNYKVHLEDLITAAGGSILDKADLSSTSLIIYSMEPPQGSDPDTLNEVIRKRKAEAEELAATIGSRAVPHTCVLDSIASCTVQLTM

SEQ ID NO: 56086 - protein, 398 aa, Oryza sativa
MSASSRFDLRASSHPHQHAIGGGGGGGGMSDGGGGAAAAFADAGNLEHCARYLNQTLVTFGFPASLDLFATDPVSIARTCNCIYALLQQRQRDIEFRESTNDLRQRMQSDISRLEAKIERMDAQLAAKDRELATLTRTEAKNTATLKAQIDKLQQERDEFQKMVIGNQQVRTQQIHEMKKKEKEYIKLQEKLNQVLMEKKKESSRSGMEIMNLLQKEGRQRGTWSGKKNDNDYYKMIVDAYEVKKQELMQENADLRALLRSMQMDMREFLNAPNGVQQPAVVGNGRQEAGSPQSPLGGKTDVFDLPFHMARDQIEESLRTKMASIKARMTQLQDAQKGAEVTSEATERELELEAQLVEARSIIQEQASLMSKHFTKSDKPRRLSGLDAEREAVAAQEV

SEQ ID NO: 56087 - protein, 300 aa, Oryza sativa
MDRGRNGRDDFFGGRDPFAGFGGFGRQRSLISGVFGGRDPFDDPFFNQPFGSGMHGPSLFGPMGGPFGDIRNDGFLEQAPPRGNGRKLIITELDEEEGENSGRQRQANREPYVQEPDDEMQGGQLQPRRDFNRANEGQPQARTFTYQSSSVTYGGVNGAYYTASKTRRTGSDGITVEESKEADTTTKEATHRISRGIHDKGHSLTRKLKSDGNVDTTQILHNLHEDELAGFEESWKGNARHHLAGLNQNAGTSNNNEPGNRGTSGRGRQSAWGWALPGREQGRDQRRNGERPKSRVIPIS

SEQ ID NO: 56088 - protein, 227 aa, Oryza sativa
MTMTSTTTKAMAMAAAVLAAAAVAATNAQTCGKQNDGMICPHNLCCSQFGYCGLGRDYCGTGCQSGACCSSQRCGSQGGGATCSNNQCCSQYGYCGFGSEYCGSGCQNGPCRADIKCGRNANGELCPNNMCCSQWGYCGLGSEFCGNGCQSGACCPEKRCGKQAGGDKCPNNFCCSAGGYCGLGGNYCGSGCQSGGCYKGGDGMAAILANNQSVSFEGIIESVAELV

SEQ ID NO: 56089 - protein, 434 aa, Oryza sativa
MEAQWLAEYPHQGADKRPRKRPRLAWDVAPPLFQPPKAIPMLYCGQELINGNFATAFLPPPPIYYTGPPRNLSPPWRPDDKDGHYVFAVGENLTPRYRILSKMGEGTFGQVLECWDLEHQETVAIKIVRSLQKYREAAMIEIDVLQRLGKHDFTGSRCVQIRNWFDYRNHICIVFERLGPSLYDFLRKNSYRAFPIDLVREFARQILESVAFMHDLRLIHTDLKPENILLVSSESIRVPDYKVTIRPPKDGSFFKNLPKSSAIKLIDFGSTTFEHQDHNYVVSTRRYRAPEVILGLGWNYSCDLWSVGCILVELCSGEALFQTHENLEHLAMMERVLGPLPKHMIVRADRRAEKYFRRGLRLDWPEGAASRESLKAVWKLPRLQNLVMQHVDHSAGDLIDLLQGLLRYDPDARLKAREALQHPFFTRCHRRCGY

SEQ ID NO: 56090 - protein, 592 aa, Oryza sativa
MITGADFYHVMTAMVPLYVAMILAYGSVKWWRIFTPDQCSGINRFVALFAVPLLSFHFISTNNPYTMNLRFIAADTLQKLIVLALLTLWSHLSRRGSLEWTITLFSLSTLPNTLVMGIPLLKGMYGEFSGSLMVQIVVLQCIIWYTLMLFMFEYRGARILITEQFPDTAGAIASIVVDADVVSLDGRRDMIETEAEVKEDGKIHVTVRRSNASRSDVYSRRSMGFSSTTPRPSNLTNAEIYSLQSSRNPTPRGSSFNHTDFYSMVGRSSNFAAGDAFGVRTGATPRPSNYEEDAAAPNKAGSKYGQYPAPNPAMAAPPKPKKAANGQAKGEDGKDLHMFVWSSSASPVSDVFGNGAEYNDAAAVKEVRMAVASPRKADGVERDDFSFGNRGVAERDAEAGDEKSVAAAVSGEHGKPGLTPAPTAMPPTSVMTRLILIMVWRKLIRNPNTYSSLIGLIWSLVCFRWNFEMPAIILKSISILSDAGLGMAMFSLGLFMALQPRIIACGNKVATFAMAVRFLTGPAVMAAASIAVGLRGTLLHVAIVQAALPQGIVPFVFAKEYSVHPDILSTAVIFGMLIALPITLVYYILLGL

SEQ ID NO: 56091 - protein, 102 aa, Oryza sativa; identical to SEQ ID NO: 38819

SEQ ID NO: 56092 - protein, 430 aa, Oryza sativa
MHLCACRILSDCIPIKQRKRTPYLIISSCLSLFPWLILGMSEPLRSSSNFLTALLIVQNLGSAMADVVIDAMIAEAVRSAGPEFAGDLQSLSWSSMAVGGIFGSLLGGYALSNLPIHVIYIIFSALPLFQLISCIFVEESPKGFESRMDNAAPKHVEDQTIDASPGKSSSESYKYEDTRRRKGARRNNKRKSLSKRPEDHDKNKSTNLRPYLSLKSAFFSLCTAFKQPTILRPMAWFFFSNVAIPNISTVMFYYQTEVLHLEASFLGTARVIGWFSLMLGTYIYNRYFKHKKLRNILMFAHVGLAIIGVLDILLVLRLHVHYGITDKYMVLWGSALADAINQFKMMPFLILSGQLCPPGIEGTLFALFMSINNFGSTLGSFLGAALASALSISSAQFDNLALGLGVQLIGTLLPVGFLFLIPKEVTGLTS

SEQ ID NO: 56093 - protein, 567 aa, Oryza sativa
MAAMQSWRKAYGALKDSTTVSLANLNSDFKDLDVAIVKATNHVECPPKERHLRKIVAATSIARPRADVAYCIHALSRRLAKTRNWIVALKTLVVIHRLLREGDPTFREELLNFAQRGRILQLSNFKDDSSPIAWDCSAWVRTYGLFLEERLECFRVLKYDVEAERLSKQGQGPEKGHSRTRELESQDLLEQLPALQQLLYRLVGCRPEGAANNNYLVQYALALVLKESFKIYCAINDGIINLVDKFFEVPRHEALKALEIYRRAGQQAGSLSDFYENCRGLELARNFQFPTLREPPQTFLVTMEEYVREAPRMVPVREPLELPERLLLTYKPEEQEEDSVPDPVEEEKPPVEEPVPVPPVTEAVSPPPPPKTKVADTGDLLGLNDPNPSVSAIEESNALALAIVPADAGASTSSTATWQDKGFDPTGWELALVTTPSNTNSSAADSQLGGGFDKLILESLYDQGDYRQRQQQQLYGSSAPNPFMSNDPFVMSNQVAPPPSVQMAAMSQQHQQIPTMMQANPFGPPMQPQHVGMGPATNPFLDSGFGPFPMANNGHQQANPFGGTQLL

SEQ ID NO: 56094 - protein, 513 aa, Oryza sativa
MGEIVSSAIVTETVNKIISGMIDNYEQKLSADELMERLEMAQIKLELALETSSKWQITSEPLLRWQKKLKRATEECDDTLRKCRQHVQEEEEKEQQVRNSSFPRRIACATKSLISSIFHGNIDEPSRSTVQRFEWFAKGADDFLKSLEFGGTPRRYLFFDPLIGHLLAGETLEYKFVQGNKQHLFWIRPNDIADRGVEAKLIFVYNDCSAPENNFFLGMMLQISESTNIIGTIIKCLQWFTPHFKSTTETVRKELAQLPTQDFSWVSHYRSYHWDNIHGIATKWFRPNPICCKHQDQSMCGSGSMDKAELLDVSLQPIIEVYLERQITQFRCNSQRAAIQGKNNKQRAAVRGKRCYPRRPSHLKLGVLFLPHSSSNDLLPAAESSAVEVINGEEQPWYHRNITLEQLDKVMLPKAIGSINQNSEATAHQLLWKSKHEAAFFHLGKTRMNMPSTLSTAREATVSRRQELDLESRADVISEFLKLWVERAPVQMQRSIVDWIQKEKEVQLAPTPF

SEQ ID NO: 56095 - protein, 625 aa, Oryza sativa
MKATLLPPPPPPAKRRRGPRVAVLALFLCSLLVPLAFLFDRSQSGYVTTDERRRQEVALPEFHHVEKADGDGTVNGLNQDAPKKTPKVNSGGLQKHKQTDRHTSRISTKPKVLPSPKVDPSEAVKESTQGTREVSKVRKRLDKGTNTDEVENEKACQLEFGSYCLWSREHKVVMKDSIVKRLKDQLFVARSYYPSIAKLEGQEELTVLMKQNIQDHERVLSVSTVDADLPSFINKKMEQMEQTIARAKSCTVDCRNVDRKLRQILDMTEDEAHFHMKQSAFLYNLGAQTLPKSHHCLSMRLTLEYFTSSSLGSNDSSARKFSAAHGRHYVILSKNILAASVVINSTVNSSKDPKKIIFHILTDAQNFYAMKYWFDKKSYREAAIHVVNYEDIIKEKLTKFNVRHLYLSEEFRVLVRSTEQPAGKTRMEYLSLFSHSHFFIPEIFKDLNKVVVLDDDVVVQRDLSFLWSLDMGDKVNGAIEFCGLRLGQVRNLLGSTTVDTKSCAWMSGINVINLDKWRKHKVTENYLLLLKKFLTKDETSLRAAAFPLSLLSFQHLIYPLDERLILSGLGYDYAIDEDVARSSAALHYNGNMKPWLELGIPSYRRYWKRFLTRDDKFMDECNIIP

SEQ ID NO: 56096 - protein, 523 aa, Oryza sativa
MEGHGNPPLNAAEAVLKRPRSVASRKPRSKEQLISEFKDLSCTPSRSISPEDDAGVEGSGHRRKELYLNGPEARGSVPHRSDASRKIKRDDNRAAGDHDEQNKSSKSKDGKHTSEGVLALACTRNSGSPDGQHLPPKDTTSMPGLRKVKLKVSGITRPLHTKNIQEASDGGTLGTSDGSSQRHKQKDSGGHKHHQDKHDVSPSSDLVRKSKRIPKKRTLDGDSGDEDGGSGYLVKFKIAKVVPEQSIATDHAGEYDESLEDDIKKKRLSKVSKNKSLPYEVDEDFTMYRSGRDGRKKLKLVDSDDFIEEEPEMDEPKKRLSEADSHSDVKNETTGLITRQRALQGRGGNGETLIEFPDGLPTASSRRQKDKASEVEAQAKKAEAAQRRKLQVEKAEREQQAEAVRKILGIDIEKKKEERKQKERDEKEKQEKTEEYRRNCIQCVMGPEGTVVTFPDKMGLPSIFDSKPISYPPPREKCAGPSCTNPYKYRDSKTKLPLCSLQCYKAVQGSSEAAQGSSETLTC

SEQ ID NO: 56097 - protein, 254 aa, Oryza sativa
MDGGGAHRTPEDVFRDFRARRAGMIKALTTDVEKFYQQCDPEKENLCLYGLPNETWEVNLPAEEVPPELPEPALGINFARDGMDEKDWLSLVAVHSDTWLLAVAFYFGARFGFDKESRKRLFSMINNLPTIYEVVTGTAKKQSKEKTPKTSGKSNKSGTKPSRQPEPNSRGPKMPPPKDEDDSGGEEEEEEEDHENTLCGACGDNYGQDEFWICCDACETWFHGKCVKITPAKAEHIKHYKCPNCSSSSKRARA

SEQ ID NO: 56098 - protein, 25 aa, Oryza sativa
MRAKWKKKRMRRLKRKRRKMRQRSK

SEQ ID NO: 56099 - protein, 286 aa, Oryza sativa
MAYYARRGGDRVSGGGRVQGGGGGGGGGGRGGYVLRGRSGMPPRGPLGLGVNSRPSARTIAKSFSRTKDMTWRPDLFSDSMAASGIETGTKLYISNLDYGVSNEDIKELFSEVGHLKRFAVHFDGYGRPNGTAEVVFTRRSDAIAALKRYNNVLLDGKAMKIEVIGSDLGLPMTPRINVVGASNGRPTRTVVMTPEIGQRGSGSGSRPTGPTVNRYNRGAFQAGRGRGRGRGRAPFQSQFQGRGTGSVRGRGQFQGRGRGRRQAGKTADELDKDLETYHAEAMKTD

SEQ ID NO: 56100 - protein, 129 aa, Oryza sativa
MRWHPGLPVVRRRRQPIPGGGELDDEQIGRLVHHLEWPSMGASPPPWIWWKPSPFTSPLRRLLIPSTRFSGGDGVLIRWLDLLHAAEAPPHPSHRVHRGLGIPLPSANILGPRDESERGSATMRLLRVP

SEQ ID NO: 56101 - protein, 329 aa, Oryza sativa
MDKTVRLWHVSSTYCLKTFSHSDYVTCIQFNPVNDKYFISGSLDKKVRIWSIQERKIVDWIDLHEMITAACYTPDGQGALVGSHKGKCHVYDISDNMLKHKKQIDLHIKKRKSSQKKITGIQFVPGSSSKVIITSADSRIRVIDSFELVCKFKGFRNTNSQISACSAVKGRYLISASEDAHVYMWRCNDDSEPNTKKGIVSITNTHEHFHCEGVTVAVSWPCASSTMTSREWPENGLSGSELDKDQEMPDAQHQSNIIRNTNPNHNGDTSATWSEELMTPTKQSPRSSASHPMEGDQAPSHSAWGLVIVTAGHEGHIRTFQNFGFPVRV

SEQ ID NO: 56102 - protein, 216 aa, Oryza sativa
MGDESEGETEEYLFKVVIIGDSAVGKSNLLSRYARNEFNLHSKATIGVEFQTQSMDINGKDVKAQIWDTAGQERFRAVTSAYYRGAFGALLVYDISRRSTFDNVGRWLQELNTHSDTTVAKMLVGNKCDLDNIREVPVEEGKALAEAEGLFFMETSALDSTNVRTAFEIVIKEIYSNVSRKILNSDSYKAELSLNRVSIEGDSKDDQKQSNRFGCC

SEQ ID NO: 56103 - protein, 481 aa, Oryza sativa
MSEAIALAMSKIETCVETVASFNNAMSKLSKKDKVVKELLEKIKQIQEQLDITNDFIQNHIGTANLGDPLDESWIATVRRLAFIVEDVMEKYLYYAHQLQEEGSQKHPVKRSSYVDVFKKVGQLMDKINNRIGHLLSIREQSKLAPQLVPHSPYPDSEGQPELIGTNGPINVLLKFLKHGEDGAVLQLKVLSMLGIGGIGKTALASKVYRMLREEFQSHAFVTVSKMPDMTRVLFDILDQIGLRKYPASLNENQVITQIGQDLKDKSYLIVIDDLWDMQHWKTIKDALPDVNCGSRLIVITRLNNIAKTCSSGQNNLTYKVMPLAHHDSRTLFLKEILGHEGSCLDAPVFDEILKMFGGMPSALKCIGSFLRNKSVTTESQKINMSSLYSELENFPSWKKLKIALFLSCCGPSQTLEACSLYLSTLPDNHKIERDILTRKWISEGIILKDDELSINGVVNNCFEELINRNVIQQVDNSFGE

SEQ ID NO: 56104 - protein, 267 aa, Oryza sativa
MASSRLLSSRRLLPALLHTPSPVPIPRAAAAAAGEVGGTPVASFLRRPARFFSSAARRGPARPRATDIGARARQLQSRRLWTYALTFGCAAGFVVTVLATFQDQLVFYLTPTDALARYATDRSKSRVRLGGLVLEGSVAHPSASSSEIEFVVTDLITDVLVRYEGALPDLFREGHSVVVEGFLKPFTDDLRRDTAGRKVSDKARDCECFFSATEVLAKHDEKYMPKEVGEALERNKKKLEEEAAAAAAASQESATAAVALDGAKSSS

SEQ ID NO: 56105 - protein, 300 aa, Oryza sativa
MRWCADAMRLVKRMQRELLVMFKKADVPVGSAVSYGGGGGGGDGGGCWFEHYMQGTAALLDFCNAFKSAVSRLHRYCMVVDFAAQVGCAGGWWLEEEPGGDDAGAIRHRLSDVRAAVSEAERLGRKIMSSSSGGGGAGDDDAGGMVVVMLVAKITMAVVSMFVLQALTSPIVPLAADVDDGHCTLGRAAAVPVPELQPWRESLSVITDRFPRRPGVAEHERVAMVVKSMMINTKMEGEEETKNGKQEQEDDHVELLRTRSGELREGVEMFDCVLDEVFDEVIKGRNEMLGIFRDKALTLG

SEQ ID NO: 56106 - protein, 650 aa, Oryza sativa
MSSKRGGGGRRGRGCGRGRSALAENDMDFHETSTPSSPSTTSDKEDNVEFTPQQSPLPCLVSPSVEHVSNTLLNPKINHRSDAIFGDQAVEQLKLRHHKPLKFHERYRPYLRDAGLLGLSQICQKMPQLDKALITALVERWRPETHSFHLASGEMTVTLQDVSMLLALPIDGRPVCSTTDHDYAQMVIDCLGHDPRGPSMPGKSFLHYKWLKKHFYELPEGTDDQTVERHVRAYILSLLCGVLFPDGTGRMSLIYLPLIADLSLVGTYSWGSAVLAFLYRSLCSVASSHNIKNIGGSLLLLQLWSWERSHVGRPLVRSPVCPETDIPQDVLPVGFRWVGARTQSENATRCLKQYRDELNLQRADQVKWEPYLHIESASLPLLCTKNADLWLTQAPLINFPIVEMYLPERVMRQFGLRQSIPPPFRPTLQALHRISRRGRERENWEETHHEYIQEWEARRQRIFPESEQYDPSSYEEYLHWYTGATRRYLVPSISDDVEAGSSLQPDDSINLHYQAKAPMIRKAVDKLHGMVKKAKIAMASTADTTTQALVFEFLHGFQDVLHDLGEIKENGGSATSPHVESAATQDMPLLLLETEQNIVDADQEAQHQEEEELHMVDDATMTLEPMDEEKMISTMSSVHVLHWSWRNIVT

SEQ ID NO: 56107 - protein, 447 aa, Oryza sativa; identical to SEQ ID NO: 37103

SEQ ID NO: 56108 - protein, 515 aa, Oryza sativa
MGSPSKTRRMKPLGIQLYECARGSPISFRSCQALVLILTFLSYASYRATRKTTSIVKSVLDPKTENLGMLHWPSHLYLQDLRDAQGNMTALYSGWAPFNADDGTALLGEIDLAFLGVYAIGMFFAGHLGDRVDLRILLTIGMIGTGFFTAAFGAGNWLNIHNFYYFLGVQMMAGLFQSSGWPSVVAVVGNWFGKSKRGLIMGIWNAHTSVGNISGSLIAAAMLKFGWSWSFAVPGVMIAVVGLAVFLFLPVGPEMIGIEEDIHEKDAEKDDMSAPLLEERSASKEKAVGFIQAWRIPGVAPFALCLFFCKLVAYTFLYWLPFYISHTAIGGVYLSDTAAGVLSTLFDVGGVVGGILAGHISDRLDARALTAASFTFSAIPALFFYRIYGSFSLYSNIALMFVTGMLVNGPYALITTAVSADLGTHSSLNGNSRALATVTAIIDGTGSIGAAVGPLLTGYISAKSWSGVFTMLMASAFVAGLLLSRLVMAEISAKMESRRPDAAASDLPVSSMEQS

SEQ ID NO: 56109 - protein, 641 aa, Oryza sativa
MMGGGLVMDQGMMFPGVHNFVDLLQQNGGDKNLGFGALVPQTSSGEQCVMGEGDLVDPPPESFPDAGEDDSDDDVEDIEELERRMWRDRMKLKRLKELQLSRGKDPAGGVVGDPSKPRQSQEQARRKKMSRAQDGILKYMLKMMEVCRAQGFVYGIIPEKGKPVSGASDNLRGWWKEKVRFDRNGPAAIAKYQADNAVPGFESELASGTGSPHSLQELQDTTLGSLLSALMQHCDPPQRRYPLEKGVPPPWWPTGDEEWWPELGIPKDQGPPPYKKPHDLKKAWKVSVLTAVIKHMSPDIEKIRRLVRQSKCLQDKMTAKEISTWLAVVKQEEELYLKLNPGARPPAPTGGITSAISFNASSSEYDVDVVDDCKGDEAGNQKAVVVADPTAFNLGAAMLNDKFLMPASMKEEATDVEFIQKRSASGAEPELMLNNRVYTCHNVQCPHSDYGYGFLDRNARNSHQYTCKYNDPLQQSTENKPSPPAIFPATYNTPNQALNNLDFGLPMDGQRSITELMNMYDNNFVANKNLSNDNATIMERPNAVNPRIQIEEGFFGQGSGIGGSNGGVFEDVNGMMQQPQQTTPAQQQFFIRDDTPFGNQMGDINGASEFRFGSGFNMSGAVEYPGAMQGQQKNDGSNWYY

SEQ ID NO: 56110 - protein, 122 aa, Oryza sativa
MTAAPRRRCSSPPGLFRSPLSRHGLAASASVSPTPVVRRRPRRRATAVICPPGCSIHGAAEGRGTAAPRHHGDHAATGWSPRGRRHQPLAPGAQDPWPACLTNFVLSKTRTTQRKFPGYATG

SEQ ID NO: 56111 - protein, 794 aa, Oryza sativa
MDLLRSHLHKVRIPEPGSRIHKDECCVSFDTPRSEGGLYVDMTSFLGFGREHVAWNYEKSGNPVYLHIVQRRKPEPDDEADRPLKKPTLLAIGVEGGFTDQEPEYDEAFEIVILPEFTSLPFPSIDLPEKVRIAVDKVILAESADRKQQLASWVADKKKVSAHAMDLKQLDNGVIVPPTGWKCSKCDKTENLWLNLTDGMILCGRRLWDGSGGNNHAIEHYEQTKYPLAVKLGTITADLEAADVFSYPEDDSVEDPLLAQHLSHFGIDFSSLQKTEMTTAERELDHNTNYDWNRIQESGKDAELLYGPGYTGLVNLGNSCYMASVMQVMFSTHPFISRYFEKQSLKAAFAIAPADPTLDLNMQMTKLAHGMLSGKYSVPNQEGQEGIHPRMFKTVIAAKHPEFSSMRQQDALDFFLHLIDQVDQANTGNHELNPFTGFKFFIEERLQCPSGKVSYNKRSDYILSLNIPLHEATNKEQLEAFHEKKAAMDLDGKEVSNEEIVRPRVPLEACLASFSGAEEVPEFYSTALNSKTTAIKTAGFKTFPDYLVLQMRKFVMEAGWVPKKLDVYVDVPDIIDISHMRSEGIQPGEELLPEGASGDNKAEPVHPVASEDIVSQLASMGFNYLHCQKAAISTSNTGVEEAMSWLLSHMDDPDINDPISKDSQAAEQTVDETSVQTLVSFGFQEDVARKALAASGGNIERATDWIFSHPEAFSSVPTDSSTSNMEDDDAHIPDGSGRYKLMAFVSHMGTSTHCGHYVAHVLKDGRWVIFNDSKVAASVDLPKDMGYLYFFQRI

SEQ ID NO: 56112 - protein, 504 aa, Oryza sativa; identical to SEQ ID NO: 53061

SEQ ID NO: 56113 - protein, 110 aa, Oryza sativa
MWEVAWWRPGTWGGLAMRVGQVAFAGASIGVMASGAGFANYTAFCYLIASMGLQSLWSLGLACLDVYVCLDSQKGSQQCSSREFVCHWRLGNCTSVLCCILLSWRCYGSV

SEQ ID NO: 56114 - protein, 59 aa, Oryza sativa
MLMLTPLNVKEQGECAQAPHQIAHPHLHKTKPLLTHHVVLHLGMMNQVQKTMKLRKGNH

SEQ ID NO: 56115 - protein, 726 aa, Oryza sativa
MAGAIRVTMEVGADGVAVVTICNPPVNALHPIIIQGLKEKYAEAMDRDDVKAIVLTGAGGKFCGGFDINVFTEVHKTGNVSLMPDVSVELVSNLMEAGKKPSVAAIQGLALGGGLELTMGCHARISTPEAQLGLPELTLGIIPGFGGTQRLPRLVGLPKAIEMMLQSKFITAKEGKEGGLVDALCSPDELIKMSRLWALEIANYRKPWIRSLARTDRLGSLSEARSVLNSARQQAKKVAANLPQHQACLDVMEEGVLCGGHAGVLKEAKVFKELVLSPTSKALVHAFFAQRLTTKVPGVTDVQLKPRKIRKVAVIGGGLMGSGIATALLVSNTSVVLKEVNPQFLQRGQKMIAANLEGLVKRGSLTKDKMNKAMSLLKGALDYSDFKDVDMVIEAVIEKIPLKQSIFSDLEKVCPPHCILATNTSTIDLNVVGEKTNSQDRIIGAHFFSPAHIMPLLEIVRTEKTSPQAILDLITVGKMIKKVPVVVGNCTGFAVNRTFFPYTQGSHLLVSIGIDVFRIDRVISSFGMPMGPFQLQDLAGYGVALAVKDIYAAAFGTRNLDSNLVDLMVQNGRQGKSNGKGYYLYEKGGKPKPDPSVQVVIDEYRRCAKTMPGGKPVTLSDQDILEMIFFPVVNEACRVMDENVVIRASDLDIASILGMGFPKFRGGLVFWADTIGAPYIHSKLSKWTEIYGDFFKPSSYLEDRAKRSLPLSAPNATQQASSRSRM

SEQ ID NO: 56116 - protein, 279 aa, Oryza sativa
MMSFSQPDAFSPSQFTSSQNAAADSTTPSKSRGASSTMPLTVKQISEAQQSGITGEKGAPFVVDGVETANVRLVGLVSGKTERNTDVSFTIDDGTGRLDFIRWVNDGADSAETAAVQNGMYVSVIGSLKGLQERKRATAFAIRPVTDYNEVTLHFIQCVRMHLENTKSQIGSPAKTYSAMGSSSSNGFSEMTTPTSVKSNPAPVLSVTNGSKTDLNTEVLNVFREPANVESEHGVHIDEIVKRFRLPEAKIKVAIDYLADIGHIYSTIDESHYKSAFNE

SEQ ID NO: 56117 - protein, 1033 aa, Oryza sativa
MAVAPPLPPAPARQLRRWKGSSPRPPPWLSSPFRRTRYLSRPAFAAGGRQDYSPSSGMGVSKTGAFRLGLYGNLNVQSSVQEWVDETKRLFFLRTTNSVRNNITNGTTPLRVGNLRHDPSEDIRSSNYPSLYNQRERGPSNSIVNRHVDTDLAKHRVMYQSAHAVPAPFSVVNNDIKPLNMLDGSKEEIPWHDSVTMESSLPKVSKSEKTLVVDKAIPDKKEHKRITRKVTPNFPDKASLSTESKNARKLLATIYDKVLVVDNVESARSVVKLLTTKYKGFIHACDTEVANIDVKEETPVGHGEVICFSICSGNSDGEADFGNGKTCIWVDVLDGGRDVLMEFAPFFEDPFIKKVWHNYSFDIHVIENCGIKVAGFHADTMHLARLWDSSRRTDGGYSLEGLTNDYRVMDAVLKDIPKTGKVSMKTIFGRKKVRKDGSEGKTISIEPVEKLQREDRELWICYSSLDSMSTLKLYESLKNKLEAKEWIFDDCPRGTMYDFYEEYWRPFGALLVKMETEGVLVDRAYLSEIEKAAVTERELAADKFRKWASKHCPDAKYMNVNSDNQIRQLFFGGIENRNKRGETWPQSKTFKVPNDEGIATEGKKTPKSRTIKLFTIVEDLKIDMFTPTGWPSVSGDVLRSLAGKIPTDHIYKIDDGQEFDEDGSSLELPEQDIEDTSPYGTAYEAFGGGKKGREACHAIAALCEVFSIDKLISGFIVPLQGDRISCKEGRIHCSLNINTETGRLSARTPNLQNQPALEKDRYKIRHAFVAAPGNTLIVADYGQLELRILAHLTNCKSMLEAFKAGGDFHSRTAMNMYQHVRDAVEEKKVLLEWHPQPGQDKPPVPLLKDAFGAERRKAKMLNFSIAYGKTAVGLSWDWKVSVREARDTLKLWYRDRKEVSAWQKKQKAFALEKCEVYTLLGRSRQFPNMTHAGPGQKGHVERAAINAPVQGSAADVAMCAMLEIERNARLKELGWRLLLQVHDEVILEGPTESAEEAKTIVVECMSKPFYGTNILKVDLAVDAKYAKSWYAAK

SEQ ID NO: 56118 - protein, 229 aa, Oryza sativa
MNIFKKKVDPKEALRTSKREMSVATRGVEREIGSLQMEEKKLVAEIKKTAKTGNEAATKILARQLVRLRQQIVNLQGTRAQIRGVATHTQAMYAGTSISAGMKGASKAMAAMNKQMEPTKQIKVMREFQKQSNQLDMTLEMMSDAIDETLDKDEAEEETEELTNQVLDEIGVDVASQLSSAPKGRIAASNRKAESNQARNAAPPRNNVEPESSAEVDDLERRLASLRRI

SEQ ID NO: 56119 - protein, 12 aa, Oryza sativa
MLCCEAWTPFTF

SEQ ID NO: 56120 - protein, 492 aa, Oryza sativa; identical to SEQ ID NO: 53002

SEQ ID NO: 56121 - protein, 709 aa, Oryza sativa; identical to SEQ ID NO: 55866

SEQ ID NO: 56122 - protein, 288 aa, Oryza sativa
MELGGNNMGPDNGANNNSNLAARQRLRWTNELHERFVEAVTQLGGPDRATPKGVLRIMGVQGLTIYHVKSHLQKYRLAKYIPDSSADGNKAENKDPGDLLAGLEGSSGLQISEALKLQMEVQKRLHEQLEVQRQLQLRIEAQGKYLKKIIEEQQRLGGVKSETPAAGASVTLPSDQFPDSERTDPSTPAPTSESPTQGVPSNRDNGGQNEATKSPQRDDSLSRHEPLTPDSNCQPGSPTASPKHERAAKRQRGNGAEFSETDFALPHSIFESSSGSEFQQCSMSYSGH

SEQ ID NO: 56123 - protein, 470 aa, Oryza sativa
MENAPATTTSSTQDGGGGAGGHVFLLAFPEAQGHVNPILQFGRHLAAHHGFLPTLVTTRHVLSTVPPPLAPFRVAAISDGFDSGGMAACGDAREYTRRLADVGSETLGVLLRSEAAAGRPPRVLVYDPHLPWAGRVARGAGVPAAAFFSQPCAVDVIYGEVWAGRVGLPVVDGGALRGLLSVELGPEDVPSFVKAPESYPPFLEAVLGQFDGLEDADDVLVNSFQELEPKEADYLASAWRFKTIGPTVPSFYLDDDRLQPNKNYGFNISDSTSPCLAWLDNQPPCSVVYASYGTVADLDPTQLDELGNGFCNSGKPFLWVVRSCDEHKLSEELRDKCKERGLIVSWCPQLEVLSHKATGCFLTHCGWNSTTEAIVTGVPLLAMPQWTDQPTTAKYIESAWGNGVRVHRDKEGMVRKEEVERCIREVLESERKAEYRKNANRWMKKAKEAMKKGGSSNKNIAEFASKYASY

SEQ ID NO: 56124 - protein, 41 aa, Oryza sativa
MITRIAGLVALLKQLILMIKQEDTKVLDLSPLELPTIVKAR

SEQ ID NO: 56125 - protein, 598 aa, Oryza sativa
MKLPAWLTAVPPDPRAYGHLIQLCAESGHLAAARQIHARLVAASVTPSNFLASKLISLYSRADRLRDARRVFDSIPQPSLFAWNAILISLSLHSPDPSAAVRLFASSAVSPDEITLSTLLRSLAASGPALSPLVTGELHAVAFLRGFGSDLFVSNALITAYANAGDMRSARAVFDEMPRRDVVSWNSLISACARAGWYRECLDLFQEFVRVRCSDGDGVGPNGVTVTSVLHACAQLKVVDFGIGVHRFAAESGLDMDMAVWNSIIGFYAKCGRLQYARQLLDGMTRKDSISYSAMITGYMNNGHVEEGMQLFRQASARGISMWNSVIAGLVQNGRQSDVLRLLQEMIASKVLPNSATLSIVMPSVPSFSTLLGAKQAHGYAIRNDYDQSIRLVSALIDAYAKAGFLDTARKVFKLTEHRSTIVWTSIISAVAAHGEAVEALSLFNQMITAGAKPDTVTFTTVLSACAHSGKVAEARKVFNSMQAVFGISPVIEQYACMVSALSRAGMLKEAVKLVNKMPFEPNAKVWGALLNGAAVVGDVEFGRYAFDRLFVIEPKNTGNYIVMANLYSNAGKWEEAETIRSMLWGVGLEKVPGCTWN

SEQ ID NO: 56126 - protein, 171 aa, Oryza sativa
MQQRRPASGRPSGTDGSDFSYRMVVDSRYQRVADGKSRLGRLILVQALHQVAGGALLLLALSKGAEMNKFAVMSVAAGLLAIVLGEIGRRRTMAVLLRMYTSLSSIAVAFSVACIIRSELFFKITKQNTESITSHELLEVVRVALGVLLQLVVIATTTRLLQNMSPPRRAS

SEQ ID NO: 56127 - protein, 597 aa, Oryza sativa
MSSPSSPPPANQTATPPPANQTAAPPPASNNSSSPPAPGSLSPPSLTPPAAPSPPSTTPSSPAAAAAASSSGLTTPVVVGIVVGGLVVLLLVTILLVCLFKKKKRHHHHHPPPPPPPHLLHYYGHPPPPPPPPPPFKGDHYGGVYQNWQQNGPPPPPDHVLKKVPSHPSPPPPPAPLNVHSGGSGSNYSGGDNSQPLVSPGAALGFSRCTFTYEDLSAATDGFSDANLLGQGGFGYVHKGVLPNGTEVAVKQLRDGSGQGEREFQAEVEIISRVHHKHLVTLVGYCISGGKRLLVYEYVPNNTLELHLHGRGRPTMEWPTRLRIALGAAKGLAYLHEDCHPKIIHRDIKSANILLDARFEAKVADFGLAKLTSDNNTHVSTRVMGTFGYLAPEYASSGQLTEKSDVFSFGVMLLELITGRRPVRSNQSQMDDSLVDWARPLMMRASDDGNYDALVDPRLGQEYNGNEMARMIACAAACVRHSARRRPRMSQVVRALEGDVSLDDLNEGVRPGHSRFLGSYNSNEYDTGHYNEDLKKFRKMAFGSGNLESSQQTQPTEFVPNRSVSMGDARQIPETEMEMGSLKKDGDSNGTRDSQAS

SEQ ID NO: 56128 - protein, 427 aa, Oryza sativa
MGTLSMSSAFPVSRAGHVAVFYVALYMVALGEGAHKPCAQAFAADQFDEKDGGECAARSSFFNWWYFGMCAGTAVTTMVSSYVQDNVGWGLGFGIPCIVIVVSLAAFLLGTRSYRFYTARTASPVARVAKAFLTLIKSWRSNRRTNPASGGKGDGDGDAGDLVEEVKSVLRLLPIWASCIIYAIIFSQTSTFFTKQAATLDRRIGRSFNVPPAALQTFISVSIVVFIPVYDRLFVPLARRYTGRPSGITMLQRVGAGLALSLVAVVLSALVETRRLRVAAGAGMADAPKARLPMSLWWMVPQYVLVGVADVFAMIGLQEFFYDQVPDAERSLGLALFLSIFGVGHLLSSLLISVIDGATARRAGGSWFANNLNRAHLDYFYWLLAGLCAVELVAFFLFSRVYTYKKKGNDADGNCDYRGVDDDGICV

SEQ ID NO: 56129 - protein, 542 aa, Oryza sativa
MMGCFTVLRSKKKKPLALTKKSVDARESTSSRLPEPEAHVPSLQSAPPSFRNKAKIHQSEKKASYSRARVLSAPSSLIVVDQDGLPYAEFDDQDDSRGKGGSIKGHRFSNPLPLPLPSPEGKLLRNFGSFKAINASGPLDASGPLPLPPKKCDGLKNFSYEELSSACQWFSGDQCVSESLTSTSYKASFRDDFTDPKTIEAIVSRLLSSTQSLKEFKTQVNTLASLQHPNLCKLIGFHAREESNERMLVYERLHHGSLDKLLFGRSDGRFMDWSARLKVALGAARGLAFLHDEGPFQAMYNDFSTSNIQIDKDFTAKLSGYGCVGFNTEEEISNASVAAANLSVETLEKGVLTPKSNVWCFGVVLLELITGRKNLDVRSSKEERNIVKWSRPFLTDDSRLSLIMDSRIKGRFPTKAARIVADIILRCLNKDPSERPTMRAVVESLASVQDIKVPCRYPLQEPSAAPRKVMLKSTSLNGIIHHHPVVTFSPSPPSRNQHLLSPRSSTSALLPPRTSCALDGPRVSSIKKSPSPILRRSGVEGF

SEQ ID NO: 56130 - protein, 282 aa, Oryza sativa
MVSDKAEDASLAVVAFCGTKPFDTEQWCADVDFSWYEIPGVGKVHGGFMKALGLQRNGGWPEQPTGAGDDGGSDKKPFAYYVIRERLRAFLAENPRARFVVAGHSLGGALAILFPTVLALHGEEDMLARLHGVYTFGQPRVGDEGLCRFMDGHLATPVSRYFRFVYCNDIVPRVPYDDTALLFKHFGTCLYFDSFYKGHVTEEEPNKNYFSLLTVVPKYANAAWELARSFVIGYVDGPEYGEGWLMRIARAAGLLLPGLPPHAPQDYVNATRLGAASLEPLR

SEQ ID NO: 56131 - protein, 110 aa, Oryza sativa
MLSLLGLTEFFPVLVIGSECDRAKPFPDPYLKALELIGASPDHTFIFEDSASGIRAGVAANVPVVGLTTRNPEKVLQDAGASLLIKDFQDPKLLSILEEIEPTVAAVEQV

SEQ ID NO: 56132 - protein, 707 aa, Oryza sativa
MNQLSASAMLSRAASLRRAAAAAFSTAAARPETGLYGFDVLRTAKGFRRFVDDAIERSDELVAYIGQLPPPAEIVRAMDEISNTVCSVIDSAELCRNTHPDKEFMDEADKASMRIYEHLQYLNTNTTLYNAILKAESEGVMLTEEARRAATTLRVDFEKGGIHLPKDKLEHVNHLNLEIAQLGRKFSENVMNKPGFVDIYPASRIPRNMQRHFKSIHRIKPWGDEEQRNQMDTTKQKGLRIVTDSGTLSTALRWVSDEEIRKQVYLVGNSEPRENITVLGKLINARDELAKTMGCKSYGDFAIRPNMAASVDVVMSFLKDLSGVVRHKAGEEFKRIQDFKRNVCNEKSAKLEPWDEDYFIGMMKSAVHNLDVSVVAAYFPLSQCLKGLNVLVESLFGATFHQIPMGDGESWHPDVMKLSLHHPDEGNLGFMYLDLYSRKGKYPGCAHFAIRGGRRLQDSNYQLPIVALVCNFSSSSKIMARLNHWDVETLFHEFGHALHSLLSRTEYQHFSGTRVALDVAEMPSNLFEFYAWDYRVLRKFAVDETTGDPIPEKLVKALNASRNMFPATELQRQIFYSIMDLTLFGEQGSKPMDTISTVADLRRKHTSWKCVEGTHWHTRFTHLINYGAGYYSYLYARCFATTIWQEVCQGDPLSRSTGSALRDKFLKHGGAKDPSALLKDFVGDSIIINSGGGIIPDISSLCKEVGL

SEQ ID NO: 56133 - protein, 497 aa, Oryza sativa
MEGVGGGGGGEEWLRPMDAEQLRECGHRMVDFVADYYKSIEAFPVLSQVQPGYLKEVLPDSAPRQPDTLDSLFDDIQQKIIPGVTHWQSPNYFAYYPSNSSTAGFLGEMLSAAFNIVGFSWITSPAATELEVIVLDWFAKMLQLPSQFLSTALGGGVIQGTASEAVLVALLAARDRALKKHGKHSLEKLVVYASDQTHSALQKACQIAGIFSENVRVVIADCNKNYAVAPEAVSEALSIDLSSGLIPFFICATVGTTSSSAVDPLPELGQIAKSNDMWFHIDAAYAGSACICPEYRHHLNGVEEADSFNMNAHKWFLTNFDCSLLWVKDRSFLIQSLSTNPEFLKNKASQANSVVDFKDWQIPLGRRFRSLKLWMVLRLYGVDNLQSYIRKHIHLAEHFEQLLLSDSRFEVVTPRTFSLVCFRLVPPTSDHENGRKLNYDMMDGVNSSGKIFLSHTVLSGKFVLRFAVGAPLTEERHVDAAWKLLRDEATKVLGKMV

SEQ ID NO: 56134 - protein, 96 aa, Oryza sativa
MHAAGSPAATSTANSPRRLPSDCDQAIDPARPLAAAAAAATAWCPVPARSPASSSSPVIAGTATNAAATSTPAPSTTGSRCSPRSADTRRNAFAVL

SEQ ID NO: 56135 - protein, 764 aa, Oryza sativa; identical to SEQ ID NO: 54539

SEQ ID NO: 56136 - protein, 307 aa, Oryza sativa; identical to SEQ ID NO: 47217

SEQ ID NO: 56137 - protein, 392 aa, Oryza sativa
MSHKTTIDHFHFHFQERSTSPLAFHPVSEGGRSRSRSRDMKKASSLSELGFDAEGASSGFFRPVADGGSTPTSHRRRLTKISVIGAGNVGMAIAQTILTRDMADEIALVDAVPDKLRGEMLDLQHAAAFLPRVRLVSDTDLAVTRGSDLAIVTAGARQIPGESRLNLLQRNVALFRKIVPALAEHSPEALLLIVSNPVDVLTYVAWKLSGFPASRVIGSGTNLDSSRFRFLLAEHLQVNAQDVQAYMVGEHGDSSVAIWSSMSVAGMPVLKSLRESHQSFDEEALEGIRRAVVDSAYEVISLKGYTSWAIGYSVASLAASLLRDQHRIHPVSVLASGFHGIPQDHEVFLSLPARLGRAGVLGVAEMELTEEEARRLRRSAKTLWENCQLLDL

SEQ ID NO: 56138 - protein, 439 aa, Oryza sativa
MGSDADMEDYGFEYSDDEPEEQDVDIENQYYNSKGMVETDPEGALAGFDQVVRMEPEKAEWGFKALKQTVKLYYKLGKYKEMMDAYREMLTYIKSAVTRNYSEKCINNIMDFVSGSASQHFSLLQEFYQTTLKALEEAKNERLWFKTNLKLCKIWFDMGEYGRMSKILKELHKSCQREDGSDDQKKGTQLLEVYAIEIQMYTETKNNKKLKELYTKALSIKSAIPHPRIMGIIRECGGKMHMAERQWADAATDFFEAFKNYDEAGNPRRIQCLKYLVLANMLMESEVNPFDGQEAKPYKNDPEILAMTNLIAAYQKNDIMEFEKILKSNRRTIMDDPFIRNYIEDLLKNIRTQVLLKLIKPYTRIRIPFISQELNFPEKDVEQLLVSLILDNRIQGHIGQVNKLLERGDRSKGMRKYQAIDKWNTQLKNIYQTVSNRVG

SEQ ID NO: 56139 - protein, 491 aa, Oryza sativa
MVPHFELSLQPNHFHFMSSVKMLPFFFFFSVETVLMAEMVASTVVQEVLGGAVSYLSSNREKVSERHNLEKLEMAHAQLEHALERSSKLPITDVSLLRQRRMFKRAYEECSEVVEKCKVRILEVAEEQGVTHSYFPKQFVQAVKAMKSYVLSFLGMNKQYLLSCSHVRRFEWFAKKAGKFARDVETGRTLWHYNFFSSLIRPLLEGKHLKYDMPLQGSKTLGITIVPVSLEGRGVEALIQLNKEDSRMPLKNFCLLLILRLSESTDIVRIIINCLQLLGPHFTRLAKDAIGQLAALQHSHPQDLEPLLALQAVDYHRSFLAFRATVARPDPFCCREKRLDPCADNTISPNLPYDIPEQVIYVRCSSYISAVEYNYLYNSSNIVRDWSILKMVINISPHFSHPEANRGSYSSRGATDKCMYASLHEMQEMAVLVPKVMDCFVCQPDLGFYSLSFHSVHGYGYLCLMKPRIRSCKTNSSCRSKARRVSKTRHN

SEQ ID NO: 56140 - protein, 129 aa, Oryza sativa
MEKYHSNSRFAPFRDAPFALRGALGSSGSSFSSIDSLRRSSTLEQARGYTSRPLGAVRPKMLPSGCRPLHTSHPLSAPVANRPLSPHLPLKKPQLSATFSISHRIFGAALGAAIISIPLATKFSLMFDV

SEQ ID NO: 56141 - protein, 239 aa, Oryza sativa
MTRTRRSTAEQAEQVLVARSSDNSEAIVGSRRERERERERERELLWRRENPGAGKGRVGRPRWQEEEEEEEEVGGGGGGINGDGEPAEPGGGDRAQGGGPVGGGGAAAVTVREAQLLLRGHHRRLLPPPAWLARLAGIHGDIYASPRDHICASLHNWALPIADPLFKTSLQLQRMHMLWFCNGDACTNGHAGQRLELVSFQVTLMSLMTQGRSYNKDMIWWSTEGTIIQCCLQTETGQH

SEQ ID NO: 56142 - protein, 638 aa, Oryza sativa
MGILGSFLVLLLLAAPAFGQLPSQDILALLAFKKGITHDPAGFITDSWNDESIDFNGCPASWNGIVCNGANVAGVVLDGHGISGVADLSVFVNLTMLVKLSMANNNLSGSLPSNVGSLKSLKFMDISNNRFSGPIPDNIGNLRSLQNLSLARNNFSGPLPDSIDGLASLQSLGVSGNSLSGPLPSSLKGLRSMVALNLSYNAFTKGIPSGLGLLVNLQSLDLSWNQLEGGVDWKFLIESTVAHVDFSGNLLTSTTPKELKFLADISETVLYLNLSNNKLTGSLIDGVELSTFGRLKVLDLSHNQLSGDLPGFNYVYDLEVLRLANNAFTGFVPSGLLKGDSLVLSELDLSANNLTGHINMITSTTLQVINLSSNALFGDLPMLAGSCTVLDLSNNKFKGNLSVIAKWSNDLEYVDLSQNNLTGTIPDVSSQFLRLNYLNLSHNSLADTIPEAVVQYPKLTVLDLSSNQFRGPIPANLLTSSMLQELYIHDNMLSGGLSFPGSSSKNLSLQVLDISGNHFNGSLPDEIASLSSLQALDISTNNFSGPLPASITKLAALTALDISINQFTGSLPDALPDTLQSFNASYNDLSGVVPVNLRKFPESSFHPGNSRLDYPASSSGLAVPLVQLVAGHSVQQLK

SEQ ID NO: 56143 - protein, 329 aa, Oryza sativa
MEGSPATRLPEADSLPDGFVESSAADQAPPPPADAGDPASRSLGLDQADATVGGGGGDETLGAPPSTLASVAQDTLDAYSAADALQSLTVGGSAAEPERALGEPAVDAGDAKESSKESSVVEQVESMADQKVVIAEGSGEQKRKVVKKSKVEKDRELFELAQAYHKVEAAPAPARARGGDRRRSASLRAPTTSAPPDLAPPPPPHPETACPASRTQRKMGCQMEELLNCRRKPPSRCTPMKPEDPSTQFLQLSTCRSPPPWMASPSPWRSDTYSPPWRPPGAGAAPPCWHQPSLCPRCSPPSPPSPAGTILRGSRSRHRHRGGRSPSSQ

SEQ ID NO: 56144 - protein, 286 aa, Oryza sativa
MSCGSDGGCRDGGGSEEFRRPRPSKVAAGDLVEPARCSDAAASPASWIDKKLLVDPKNLFIGSKIGEGAHGKVYKGKYGEQIVAIKVLNNGTTPEEKATLEARFIREVNMMCKVKHDNLVKFIGACKEPLMVIVSELLPGMSLKNYLNSLRPSQLDIHTAIGYALDIAHAMECLHANGIIHRDLKPDNLLLTANRKKLKLTDFGLAREETVTEMMTAETGTYRWMAPELYSTVTLQRGEKKHYTNKVDVYSFGIVLWELLTNKMPFEGMSNLQAAYAAAFKVSVKQ

SEQ ID NO: 56145 - protein, 68 aa, Oryza sativa
MRNQPTTHNTLAGIKGLIPLGQRGSREKFGHLLQPLLDSWCGGFLMGWFGCRSSPRRLISFLLTSHLE

SEQ ID NO: 56146 - protein, 319 aa, Oryza sativa
MAFMSMERSTWAFTFGILGNLISLMVFLSPLPTFYRVYRKKSTEGFQSTPYVVTLFSCMLWMYYAFVKSGAELLVTINGVGCVIETVYLAMYLAYAPKSARMLTAKMLLGLNIGLFGVIALVTLLLSRGELRVHVLGWICVAVSLSVFAAPLSIIRLVIRTKSVEFMPFSLSFFLVLSAVIWFLYGLLKKDVFVALPNVLGFVFGVAQMALYMAYRSKKPLVASSSSAVVAAGLEIKLPEHVKEVQAVAKGAVAAAPEGRISCGAEVHPIDDVMPSEVVEVKVDDEETNRTDEMAGDGDHAMVRTEQIIKPDMAIVVEV

SEQ ID NO: 56147 - protein, 1059 aa, Oryza sativa
MAALLVLVVLVVLGGGGAAGDDVAALLEFKKGISDRGRDPVLGSWSPPATPDAGGGGGGCPSGWRGVVCDGGAVVGVALDGLGLAGELKLVTLSGMRALQNLSLAGNAFSGRLPPGIGYLSSLRHLDLSGNRFYGPIPGRLADLSGLVHLNLSHNNFSSGFPTDGIRQLQNLRRIDLRSNSFWGNAGDLLAELRNAEYIDLSDNLFTGAVDLELESLSSIGNTVKYLNLSHNKLQGGFFRNETVGAFKNLEVLDLSNSGIAGMVPQIDAWFSLAVFRVAGNALSGVMPEAMLQNSMRLVEVDLSRNGFSGSVPVVNSTTLKLLNLSSNTFSGSLPSTVGKCSSVDLSGNQLSGELAILRAWDGTVETIDLSSNKLEGSYPNDASQFQNLVSLKLRNNLLSGSIPSVLGTYQKLQFLDLSLNALGGPVLPFFFLSPTLTVLNLSGNNFTGTIPFQSTHSTESIALIQPVLRIVDLSSNSLSGPLPPDISNLQRVEFLTLAMNELSGEIPSEISKLQGLEYLDLSHNHFTGRIPDMPQASLKIFNVSYNDLQGTVPKSVEKFPITCFRPGNDLLVFPDGLPAGNYDDTGVAQSQSSHGHKAGVRVALIVGCIGAALLVIFIALAIYVVRSQELCGRNGFRGQITIRDLKLGRLSRPNLFKPPKDNVIPTKTSFSNDHLLTAAARSMSAQKELLAEAAVEYGYADPKEVTEPSSSGMAETSAAVPAMEPSPRVVLPTSPHFIDSRFHEEPVAFEVYSPDRLVGELIFLDSTLVFTAEDLSRAPAEVLGRSSHGTTYKAALQSGHVLTVKWLRVGLVKHKKDFTKEIKRIGTIRHPNIISWRAFYWGPKEQERLIISDYVNGDSLALYLYESTPRRYSRLSVSQRLKIAIDLARCLQFLHHEKGLPHGNLKPTNIFLTGPDLSPKLVDYGLHRFMTPSGTAEQILNLGALGYRAPELANTAKPMPSFKADVYAFGVIVMEMLTRKSAGDIISGQSGAVDLTDWVQMCNREGRGTDCFDRDITGLEESPRVMDELLAISLRCILPVNERPNMKTVCDDLCSRTV

SEQ ID NO: 56148 - protein, 336 aa, Oryza sativa
MKGLFKSKPRTPADVVRQTRELLIFLDLHSGSRGGDAKREEKMAELSKNIRELKSILYGNGESEPVTEACVQLTQEFFRENTLRLLIICLPKLNLETRKDATQVVANLQRQQVSSKIVASEYLEANKDLLDTLISGYENMDIALHYGSMLRECIRHQSIARYVLESDHMKKFFDYIQLPNFDIASDASATFKELLTRHKATVAEFLSKNYDWFFSEFNTRLLSSTNYITKRQAIKFLGDMLLDRSNSTVMMRYVSSKDNLMILMNLLRDSSKNIQIEAFHVFKLFAANKNKPTEVVNILVTNRSKLLRFFAGFKIDKEDEQFEADKEQVIKEISAL

SEQ ID NO: 56149 - protein, 209 aa, Oryza sativa; identical to SEQ ID NO: 30770

SEQ ID NO: 56150 - protein, 404 aa, Oryza sativa
MAAATTSRRGPGAMDDENLTFETSPGVEVISSFDQMGIREDLLRGIYAYGFEKPSAIQQRAVLPIISGRDVIAQAQSGTGKTSMISLSVCQIVDTAVREVQALILSPTRELAAQTERVMLAIGDYINIQVHACIGGKSIGEDIRKLEHGVHVVSGTPGRVCDMIKRRTLRTRAIKLLILDEADEMLGRGFKDQIYDVYRYLPPELQVCLISATLPHEILEMTSKFMTDPVRILVKRDELTLEGIKQFFVAVEKEEWKFDTLCDLYDTLTITQAVIFCNTKRKVDWLTERMRSNNFTVSAMHGDMPQKERDAIMGEFRCGATRVLITTDVWARGLDVQQVSLVINYDLPNNRELYIHRIGRSGRFGRKGVAINFVKKEDIRILRDIEQYYSTQIDEMPMNVADLI

SEQ ID NO: 56151 - protein, 808 aa, Oryza sativa
MIAPPAPSRSPSGRSCSSLTSPYTTPTSWRCGRVTSPSSMASRRSLGSGTPSSSALPRATRSSPPRTPKVAIYSRSLSPPGHPGLKPLSGGDEVMLLVDNVGVVVDRSGHPVGSSFVFNTTPDCIAEVYPYVVVAGDSKVDVYRRKNGAHLQAIPFARPGTGGLIVASEDAGIGSDVVVIATAYKVFCYRKVSAVEQIKALLRRKSYAEAISLLQEFEADGEISNDMISFVHAQLGFLLFFDLRFEDAVNHFLLSETMQPAEIFPFIMRDPNRWSDLVPRKRYWGLHAPPKPLEEVIDDGLVTLQQALFLKKAGVDTVVDDDFLSNPPSRADLLEVAIRNIIRYLCASREKDLSSSEMEGVDTLLMYLYRALNLVDDMEKLASSQNSCVVEELESLLDDSGHLRTLAFLYGSKGMCSKSLGIWRILARNYSTGLWKDHAILPETDSLETSVGKMSGEEIAAVEASKILQASSDQDLVLEHLGWVADIDQELATAILTSEMREKQLSPEKVVAAIDPEKVGIHQRYLQWLIEEQECDEPHYHTSYALSLSRSAMDAVRLGSNNEERNNKEFDSDMQFIYLLRERLQFFLQSSDLYDPEEVLYVISESELWLEKAILYRKMGQENIVLQILALKLEDSEAAEQYCAEIGRDDAYIQLLDLYLDPKNGKGPMFTAAVRLLHNHGESLDPIQVLERLSADMPLQLASDTILRMLRARVHHHRQGQVVHNLSRATNLDARLTRLEERSRHVQLTDESICDSCRARLGTKLFVMYPDDSVVCYRCYRNQGDSASPHGRNFRKGGIFKQSWLVSR

SEQ ID NO: 56152 - protein, 527 aa, Oryza sativa
MEVAMVCTRVNLLILILSLCSPYKFIQSPMDFGPLNLLPTTTTASSDFGRILFHSPSAVLKPQAPRDISLLLSFLSASPLGKVTVAARGAGHSIHGQAQALDGIVVEMSSLPSEIEFYRRGEGDVSYADVGGGIMWIELLEQSLKLGLAPRSWTDYLYLTIGGTLSNAGISGQTFKHGPQISNVLQLEVVTGRGEIVTCSPTKDAELFNAVLGGLGQFGIITRARILLQEAPQKVKWVRAFYDDFATFTKDQELLVSMPVLVDYVEGFIVLNEQSLHSSSIAFPTNVDFNPDFGTKNNPKIYYCIEFAVHDYQNKNINVEQVVEVISRQMSHIASHLYSVEVSYFDFLNRVRMEEMSLRNSGLWEVHHPWLNMFVPSAGISDFRDLLMDSISPDNFEGLILIYPLLRHKWDTNTSVVLPDSGSTDQVMYAVGILRSANPDDGCSHHCLQELLLRHRRLAGAAASGLGAKQYLAHHPTPAGWRRHFGRRWERFADRKARFDPRCILGPGQGIFPRDSSSSNGAFASYS

SEQ ID NO: 56153 - protein, 298 aa, Oryza sativa
MVAAVAPEWATKEPCLMGIDEAGRGPVLGPMVYGCMYCARSYQDTLATLKFADSKTLKEEQREELFESLKDNSSIGWEVDVICPKELSAKMLKRSKVNLNEISHNSAMGLVKRALDMGVLLAEVYIDTVGDAEKYRIKLTEKFPGIKFVVAKKADSLFPVVSGASIVSKVTRDRALRNWVFDETAQNMHMNTGSGYPGDPSTKQWLEDHKHPIFGFPSLVRFSWGTCTPFFNDAIEVTWESNELEEDAGSNGSVKRQVKLSSLGFTGFKRKSEEIDSSGKGRCKFFQARKLELIRKFQ

SEQ ID NO: 56154 - protein, 510 aa, Oryza sativa
MICRSLLLLRSNAASKASNIVKHVAATGCLPKYSSEAPARYFSSEPSLQVDSTEENGFKGHGMLAPFTAGWQSTDLHPLVIDRSEGSYVYDINGKKYIDALAGLWSTALGGNEPRLIKAATDQLNKLPFYHSFWNRTTKPSLDLANEILSMFTAREMGKIFFTNSGSEANDSQVKLVWYYNNALGRPNKKKFIARSKSYHGSTLVSASLSGLPALHQKFDLPAPFVLHTDCPHYWRFHLPDETEEEFATRLATNLENLILKEGPETIAAFIAEPVMGAGGVIHPPKTYFEKIQAVLKKYDILLIADEVITAFGRLGTMFGCDMYDIKPDLVSIAKALSSAYMPIGAILVSPEITDVIYSQNNKLGSFAHGFTYSGHPVSCAVAIEALKIYKERNIIEHVQKIAPRFQEGIKAFSGSPIVGEIRGLGLILGTEFVDNKSPNDPFPAEWGVGSLFGAECEKRGMLIRVAGDNIMLSPPLIMTPDEVEEIICKYGDALKATEERIAELKAKRG

SEQ ID NO: 56155 - protein, 275 aa, Oryza sativa
MSDFQEIEEEEINKGDQHPVLSEIFDSHFVSFLSKLETDIRDNIMDIFSRTKTATAIIPAELEQKNGEVDGEYIKRLKSFVEKQCNEMQDLLGRNAMLAEELVRTGGGNSADSLQKPSSGRERVQIESLRQELEGATRRIEALRAEHTQIEAEASNQRNLAAKLESDLKSLSDAYNSLEQANFRLDSEVKALRQGGSAPYPDVEAIKAEAKEEAEKESEAELNDLLVCLGQEQSKVEKLSTRLAELGEDVDTLLQGIGDDTALPDDDDDEDEDDE

SEQ ID NO: 56156 - protein, 488 aa, Oryza sativa
MLRVVSTLPALRPLLAGSTLLLNARPLLRSRLTRRPFRAVSSSTASPSSSSSGARDFGGVDFGDERLLRCAAAGRAPLRVAVLVSGGVDSSVALRLLHAAGHRCTAFYLKIWFQEDFRNFWSECPWDDDLKYAQAVCDKIDVPLEVVHLSDEYWNHVVSHIINEYRSGRTPNPDVLCNTRIKFGAFLEAIENLGFDYIASGHYAHVVHPSPDDVEGPSVLQLSKDKVKDQTYFLSHLSQTQLRRLLFPLGCITKDEVRRLAAQMDLPNQDRKDSQGICFLGKVKFSEFVERQIGEMEGVLLEAETGDYLGTHRGFWFYTIGQRQGLRLPGGPWYVVEKGVQNNVVFVSRNYYSLDKRRRTFRVGSLNWFSNSGPTNNEQLKCKVRHSPEFHDCTVTQEQTSEHGVILVVRLSEDDQGLAAGQFAAFYRDNLCLGSGIILDSWDEMNFPVCARALEIARMEDKSRLGKPVKIMNLEHIVKSEKEAIEVA

SEQ ID NO: 56157 - protein, 197 aa, Oryza sativa
MAAAAEDVEFVDYDRDEEEEEDAMDEVDRGGGRGGRALPVPHIVSQGVMRSRGRLLGRSTSVLASNRDRFDSLADAGNPGHGPQRSIEGWILLVSGVKEDAEEDDLYNTFSDFGHVKDLHLNLERRTGYAKGYALVEYESFEEAQTAIKAMNGTQLLTRTVYVDWAFSRGPIQKLTSTRPLHRRSRTPPRRLAALTC

SEQ ID NO: 56158 - protein, 57 aa, Oryza sativa; identical to SEQ ID NO: 42506

SEQ ID NO: 56159 - protein, 1011 aa, Oryza sativa
MASRRPTHRHHTEAPDPGGRGRGRGRAARYAQPQPQPQQQQQQQGRGCRARGASPPPPPQQQQQQQPRSTPTRATTVTVASSSSTTATASSSPLAPELRQAIMEAPRPSELAQPSPTPPQEQPVDAATTTPHHIPSSSKSIRFPLRPGKGTIGTRCMVKANHFFAHLPNKDLHHYDVSITPEVTSRIVNRAVIKELVNLYKASYLGGRLPAYDGRKSLYTAGPLPFTSQEFQITLLDDDDGSGSERRQRTFRVVIKFAARADLHRLELFLAGRHAEAPQEALQVLDIVLRELPSARYAPFGRSFFSAYLGRRQPLGEGLESWRGFYQSIRPTQMGLSLNIDMSATAFIEPLPVIDFVAQLLNSDIHSRPLSDAERVKIKKALRGVKVEVTHRGNMRRKYRISGLTIQPTRELTFPVDEGGTVKSVVQYFQETYGFAIQHTYLPCLTVQRLNYLPMEVCKIVEGQRYSKRLNQNQIRALLEETCQHPRDRERDIIKMVKHNAYQDDPYAKEFGIKISDRLASVEARILPAPRLKYNETGREKDCLPRVGQWNMMNKKMVNGGKVRSWMCVNFARNVQESVVRGFCHELALMCQASGMDFAPEPILPPLNAHPDQVERALKARYHDAMNVLGPQRRELDLLIGILPDNNGSLYGDLKRVCEIDLGIVSQCCCTKQVFKMNKQILANLALKINVKVGGRNTVLVDAVSRRIPLVTDRPTIIFGADVTHPHPGEDSSPSIAAVVASQDWPEVTKYAGLVSAQAHRQELIEDLYKIWQDPQRGTVSGGMIRELLISFKRSTGEKPQRIIFYRDGVSEGQFYQVLLYELNAIRKACASLETNYQPKVTFIVVQKRHHTRLFAHNHNDQNSVDRSGNILPGTVVDSKIRHPTEFDFYLCSHAGIKGTSRPAHYHVLWDENNFTADALQILTNNLCYTYARCTRSVSIVPPAYYAHLAAFRARFYMEPDTSDSSSVVSGPGVRGPLSGSSTSRTRAPGGAAVKPLPALKDSVKRVMFYC

SEQ ID NO: 56160 - protein, 850 aa, Oryza sativa
MESQIPNYPNLPPQLICQLHNVTMHADAETDEVYAQMTLQPLSPQELKDPYLPAELGSANKQPTNYFCKTLTASDTSTHGGFSVPRRAAEKVFPPLDFTQQPPAQELIAKDLHGNEWKFRHIFRGQPKRHLLTTGWSVFVSAKRLVAGDSVLFIWNDNNQLLLGIRRANRPQTVMPSSVLSSDSMHIGLLAAAAHAASTNSRFTIFYNPRASPSEFVIPLSKYVKAVYHTRISVGMRFRMLFETEESSVRRYMGTITGISDLDAARWPNSHWRSVKVGWDESTAGERQPRVSLWEIEPLTTFPMYPSPFPLRLKRPWPTGLPSLHGGKDDDLTSSLMWLRDSANPGFQSLNFGGLGMNPWMQPRFDASLLGLQPDMYQTIAATAFQDPTKQVSPTILQFQQPQNIGGRANTLLPSQILQQVQPQFQQQQYLQNINETTIQGHAQSEFLQQQLQRCQSFTEQKPQLQTQQQQQESQQQQQQQSQCMQVPQHQQMQQQKNMTNYQSVPNALSPFSQLSSPSQSSPMTLQTVLPFSQPQSYPDTSMSSLSPSNTSTMHNALRPFSSEAPSHLSMPRPTAVPVPDPWSSKRVAVESLLPSRPQVTSQMEQLDSTAPSIPQSSALAPLPGRGCLVDQDGNSDPQNHLLFGVNIDSQSLLMQGGIPSLQGENDSTAIPYSTSNFLSPSQNDFPLDQTLSSADCLDESGYVPCSQNSDQVINRPPATFVKVYKSGTYGRSLDITRFSSYHELRRELGRLFGLEGQLENPLRSGWQLVFVDREDDVLLVGDDPWQEFVNSVSCIKILSPQEVQQMGKPFELLSSAPGKRLGSSCDDYVSRQESRSLSTGIASVGSVEF

SEQ ID NO: 56161 - protein, 539 aa, Oryza sativa
MAAPASPLHPLAAIAAALLLLLVAAPSAAAAASPVFPGVPPLQLQALQQRRPASSAGGSRYVVAAAAAAAGGNGTAAAAKPFTAHYFPQELDHFTFTPNASAVFYQKYLVNDTFWRRSAAAGETPAGPIFVYTGNEGDIEWFATNTGFMFDIAPSFGALLVFIEHRFYGESKPFGNESNSSPEKLGYLTSTQALADFAVLITSLKHNLSAVSSPVVVFGGSYGGMLASWFRLKYPHVTIGAVASSAPILQFDYITPWSSFYEAVSQDYKSESFNCFSVIKAAWDLIDERGSTDAGLLQLSKTFRACKTVKSVYSFRNWLWTAFVYTAMVDYPTPANFLMNLPAYPIKEMCKIIHGFPAGADIVDKAFAAASLYYNYTGDQTCFQLEDGEDPHGLSGWGWQACTEMVMPMTISNESMFPPFTFTYEGKSDDCFQSYGVRPRPHWITTEYGGNRIDLVLKRFGSNIIFSNGMRDPWSRGGVLKNISSSIIALVTEKGAHHLDFRSATKDDPDWVVEQRRQEVKIIQGWIDQYNEDLAQISK

SEQ ID NO: 56162 - protein, 405 aa, Oryza sativa
MVSTRGAAANAPGRRGRPPKAAEEAARSPVLSSPVVAADAAEGYERERAERIRENMERMQKLGILDLATRFNQSAGGLAGSGSGRGRGRRKAAVTPGSVGVGRMIKPASPSPARRSLRLKNVEPVSYCEIRTKKDKDDNEGGNSVLIEAGSKEEVYTEEDEKLLGPCVEPWTLFVDGYGKDGKRIYDQVRGQTCHQCRQKTLGHHTSCCKCQIVQGQFCGDCLYMRYGENVLEAKKNPDWICPVCRGICNCSICRTKKGWFPTGAAYRKVVSLGYKSVAHYLIATQRASPAGSADSNKVAATKSEASSESDQAPVAKEDQEDAEMSGKAIQKVEADHQVNNPPDDSDNDDSRSESVVTSDSQDCQVNLDIGCATPSKPTGPKKRKWIERSPDCVASRLRSRSNKS

SEQ ID NO: 56163 - protein, 335 aa, Oryza sativa
MDSGGTASPAGVAGDGAGGRGSVFRGDDAPKLLAALKEMKEGLDLVTGKVKALTRKVKKNQLPTADGIGYLEAKHHLLLSYCQDIVYYLLRKAKGLSVEGHPVVRSLVEIRLFLEKIRPIDKKMEYQIQKLTNAADSGAAQEKVLNAEAKSKDQPKDDEDLLKYRPNPDMMDSKIDPAGQDNDGIYRPPKFIAATMDDEDKRHKQASRKDKTLARMATESSYFKEIIDDAADRPEELKETAGDESREFTRYMRQRELQEKQEEELFTRAPLTKRDKQTEKWMRKELHGLRGLTDGFDLGINMFVDGDKDNDVGSTERHFKSGGRRKHHKGKRKRH

SEQ ID NO: 56164 - protein, 859 aa, Oryza sativa
MAAAMVAAVHGVGRQDRSSPGGGGAPQVDTGKYVRYTPEQVEALERVYGECPKPSSLRRQQLIRECPILSNIEPKQIKVWFQNRRCREKQRKEASRLQTVNRKLTAMNKLLMEENDRLQKQVSRLVYENGYMRQQLHNPSVATTDTSCESVVTSGQHHQQQNPAATRPQRDANNPAGLLAIAEETLAEFLSKATGTAVDWVQMVGMKPGPDSIGIIAVSHNCSGVAARACGLVSLEPTKVAEILKDRPSWYRDCRCVDVLHVIPTGNGGTIELIYMQTYAPTTLAAPRDFWILRYTSGLEDGSLVICERSLTQSTGGPSGPNTPNFVRAEVLPSGYLIRPCEGGGSMIHIVDHVDLDAWSVPEVLRPLYESPKILAQKMTIAALRHIRQIAHESSGEMPYGGGRQPAVLRTFSQRLSRGFNDAVNGFPDDGWSLMSSDGAEDVTIAFNSSPNKLVGSHVNSSQLFSAIGGGILCAKASMLLQNVPPALLVRFLREHRSEWADPGVDAYSAAALRASPYAVPGLRAGGFMGSQVILPLAHTLEHEEFLEVIRLEGHSLCHDEVVLSRDMYLLQLCSGVDENAAGACAQLVFAPIDESFADDAPLLPSGFRVIPLDGKTDAPSATRTLDLASTLEVGSGGTTRASSDTSSTCNTRSVLTIAFQFSYENHLRESVAAMARQYVRTVVASVQRVAMAIAPSRLGGQIETKNPPGSPEAHTLARWIGRSYRFHTGADLLRTDSQSTDSSLKAMWQHSDSIMCCSLKAAPVFTFANQAGLDMLETTLIALQDISLEKILDDDGRKALCTEFPKIMQQGFAYLPGGVCVSSMGRPVSYEQAVAWKVLSDDDTPHCLAFMFVNWSFV

SEQ ID NO: 56165 - protein, 162 aa, Oryza sativa; identical to SEQ ID NO: 47161

SEQ ID NO: 56166 - protein, 443 aa, Oryza sativa
MPSFPPPGAVTICEINRDLVAADAVSDDRAKDAYGDVLGMVFSPIPFQPDAIVATHEPPAATEAAEPAEIVPRTSLASTIAESFKQMIFPSCDPNLLQEIDTQKVSWNPHKHCLAFVSGKNQVTVHDFEEPDNKESYILTSDHQKDVKAVEWRPNSGKMIAVGCKGGICLWSASYPGNVASVKSGVTSSSFGAFPRGSGGQWILVDILRGSSAELVSALCWKPDGRYLVSASCNSPSFTIWDVSQGLGMPIRRGLSSISLVQWSPSGDYLLTAKLDGTFHLWETNTWTSEPWSSSNGYVSGANWDPEGRIVLLSFSNSTTLGSIHFSSKPPSLDAHLLPVEHPEISSLIVSRGIDKLAWDSSGERLALSFKDGNEMYHGLVAVYDVRRSPLVSVLLVGFIRGPGEGAKPLAFAFHSKFKQGPLLSVCWSSGWCCTYPLILRPH

SEQ ID NO: 56167 - protein, 384 aa, Oryza sativa
MKEEFAVLSRDEKMGVLDSSAPELVGLLSELKDAHEELMAIGPVTNEVTAGRSKDKGKMQPLEVKRACLAAYCQAITFYLLMKAEGLSVQDHPVIARLVDIKSVVEKMKHANVNFPRQKEDSDDYCMPDSNIMDVADMISLDKKNIYSNLLLRDKGVEVAELTKNDHSNKDHHEIAKRKGKDEHIGSQSLEMLKVRATLEERLKEKGLYNLTRLKRKKVSNTRTTNRSDLQTLDDFDDEVLKNTQAIKPSKVLVAAAKSNKNKFVSGDDELPKRDDIGERRRKHELRVLARVGASTLEDDDLPEEDDHTEERPNQLSEENGSDDDIGPSESEDEFYKDVKRRRTEKLSSKEQKYSPNPVIESLEEETEGDGKRKISYQMEKNRG

SEQ ID NO: 56168 - protein, 926 aa, Oryza sativa
MEQREARQEEEEEEERDAPAVPPGENDEERDRNLSSRVVSLLFGGDISAQTFEKWVSLVRKRSGAFRPSGFPRRNSRIEVMPSGSFSLFSAADLSEQVVTAELIGKEDIPLTSSQPTEISLWERLGNASALDIESPDFSWNMLSSLHHTEHSSSSDHSEDEMCKPLEVTVNSGGVVFFALFNSSSNVLPKEAAAVIKFSSSKMSTQAERLGYEFARLLGVQTPQARVVHNSSLEWQDIRKAAENARSVAVSNSDEVGEMTCSELLEALELSRCLLLMSYIHGSPLLESSKAFSPREAACVTASSLGRVLMLDLILRNEDRLPCRQLGWRGNPANLMISDRPSAPSVDRLDDSKCTTESSIPTITQLVQSDKRTHTANATINSPELVSMSPKPDALKSVRGNADSLDGPVHIVAIDTGVPRRPPAGRRVKDHERYPKVVQLMLNNSDYSSNILYEISGGKLGTPGPDEAIAFTDSCCSISDEDNTAAIHEFRGAFRAALRDLEGFHLFLLQLYQKLDGVLRVFLSIVTKGSEESDNNDATVPDFPSPGANYSTPCAPSKQQNSELHGDSEILKSTTKPSSAGSRGSSDSVSPLSRESWSNKYFKGSAEGPRSLRMTMKLRDFYKTPKVDPELVKEIEQWNEALKSDVINFCEENNFHSGFFDGNENNMVADAYELKVRLEHIIERIALVSDAANTERPSLVINNLFIGGALAARSMYTLQHLGITHILCLCSNEIGQSDSQFPDLFEYKNFSISDDDDANISDLFEEASDYFDHVDHVGGKVLVHCFEGKSRSATIVLAYLMLRKGLTLAKAWNLLKKVHRRAQPNDGFAKALLALDRKLHGKVSMDWQHKRPEMKVCPICSKNVGLSTSSLKLHLQKAHKRLSAGSVDSAMTLEIQKSIQSLRISRGGSLSPSQKLTKAFADELSF

SEQ ID NO: 56169 - protein, 641 aa, Oryza sativa
MSAAVGGAEFHGFRGGGGGAAQLQRSRMLGRPLRVATPHAAAPAGGGGSSSASIRAVSAPLKKDASEVKRSKVEIIKEKSNFLRYPLNEELVSEAPNINDSAVQLIKFHGSYQQTDRDVRGQKNYSFMLRTKNPCGKVPNQLYLAMDTLADEFGIGTLRLTTRQTFQLHGVLKKNLKTVISTVIKNMGSSLGACGDLNRNVLAPAAPYVRKDILFAQETAENIAALLTPQSGAYYDLWVDGEKIMSAEEPPEVTKARNDNTYGTNFPDSPEPIYGTQYLPRKFKIAVTVAGDNSVDILTNDIGVVVVSDSAGEPVGFNIYVGGGMGRTHRVETTFPRLADPLGYVPKEDILYAIKAIVVTQRENGRRDDRRYSRMKYLIDNWGIEKFRAEVEKYYGKKFEDSRPLPEWQFNSYLGWQEQGDGKLFYGVHVDNGRVAGQAKKTLREIIEKYNLEVSITPNQNLILCGIDQAWKDPITAALAQSGLLEPKDVDPLNITSMACPALPLCPLAQTEAERGILPILKRIRAVFDKVGIKDHESVVVRITGCPNGYARPYMAEVGFVGDGPNSYQIWLGGTPNQSTLAETFMNKVKLQDIEKVLEPLFSYWNSTRQEGESFGSFTRRTGFDKLKEVVNKWAESASAA

SEQ ID NO: 56170 - protein, 564 aa, Oryza sativa; identical to SEQ ID NO: 50254

SEQ ID NO: 56171 - protein, 275 aa, Oryza sativa
MMDLSTTSVVAAKAYKYRAESLVKDYLLADCYVSYTAVLGGILMCKMVYDITHLISSLYYKGYGSLTKIQKLEWNNRGMSTVHAMFITLMSVYLVFFSNLFSDELDGPVTVRSSNLSNFTLGVSLGYFIADLAMLSWAYPSLGGMEYVLHHLLSIISLVYAIYSEEGQLYTYMVLISETTTPGINLRWFLDTVGMKRSKAYLVNGVTMFVAWLVARIILFIYLFYHIYFHIDQVKQMRTFSCILIFAVPTILLVMNTVWFVKILRGLKKTLAKRQ

SEQ ID NO: 56172 - protein, 439 aa, Oryza sativa; identical to SEQ ID NO: 34861

SEQ ID NO: 56173 - protein, 304 aa, Oryza sativa
MVGKSGVAEEGGAAAAAAVRRWVEAGGGRLVMDGGLATELEANGADLNDPLWSAKCLLSSPHLVRKVHLDYLEAGANIIITASYQATIQGFESKGFSKEQSEDLLAKSVEIAREARDMFLKEHSDRPIQHPILVAASIGSYGAYLADGSEYSGDYGEAGTLEFLKDFHKRRLEVLAEAGPDLIAFETIPNKLEAQAYVELLDECNISIPAWFSFNSKDGVHIVSGDSLIECATIANGCSKVGAVGINCTPPRFIHGLILSIRKVCSCTCFSGSETCLSSVSYVLVKESCFLLVCACTNYIKHAD

SEQ ID NO: 56174 - protein, 269 aa, Oryza sativa
MSSTSSSQPPASSDRESTPASDNATSPDSDGTNSAGPARSRIALQLDQRSLHFSVTAWVLIVALIGILPLTPRQLQYKGYRLSLLGTTCTTGYALFAFYRLPRAGNMHAAQIFHHVASSKDFIPFMYCLMFVMSKLHLKLVLVPVICWALEHVARFLRRHFTNSSLYRTYLEKPCTWVETNTTAVKFLSSNAEILLGFLLILSLFSRQRNPMQTFMYWQLLKLMYHSPFTAGYHRAIWLKIGRTVNPYIHRYTPFLHDPINAGMRWWFR

SEQ ID NO: 56175 - protein, 312 aa, Oryza sativa
MASQRRRSSAATIAVFFFLLSLLAVFFQPAAAYYHPQGKRQTVAVFWGRNKAEGSLRQTCDTGDYNIVIISFLSVFGHGKYWLDLSGHDLRDVGADIRHCQSKGVYMLLSIGGDGDGYSLPSSKSAADVAYNLYHSFLGRPRAGIFRPFGDDTIVNGVNFFIDHGPGDHYDDLANRINDYNQNIHDPIGIMLTATVRCSYPDPRMKKALDTKLFTQIHVRFYDDPRCSYNHAGLAGVMAQWNRWSARYPNSRIFLGLAAANVTGKNDMVGVGELSRKLLPAVQKTESYAGVTLWNSYYDSKTHYGRYVKHWA

SEQ ID NO: 56176 - protein, 385 aa, Oryza sativa
MLLSGPSPQQPTPPLLLPESSGEDGGHDSSSRAAASGGGGGPKKRAETWVQDETLCLIALRREMDSHFNTSKSNKHLWEAISARMREQGFDRSPTMCTDKWRNLLKEFKKARSHARGGGGGGVGGGGAGTGGGNCPAKMACYKEIDDLLKRRGKPTGGGGAAVGSGAVKSPTVTSKIDSYLQFDKGFEDASIPFGPVEASGRSLLSVEDRLEPDSHPLALTADAVATNGVNPWNWRDTSTNGGDNQVTFGGRVILVKWGDYTKRIGIDGTADAIKEAIKSAFGLRTRRAFWLEDEDEVVRSLDRDMPVGTYTLHLDTGMTIKLYMFENDEVRTEDKTFYTEEDFRDFLSRRGWTLLREYSGYRIADTLDDLRPGVIYEGMRSLGD

SEQ ID NO: 56177 - protein, 372 aa, Oryza sativa
MASGHEDLLDGMELAAATEDKETHSFEIDPSQVENVKQRCLPNALNFPMLEEYDFRNDTVNPDLEMELKPQARPRPYQEKSLSKMFGNGRARSGIIVLPCGAGKSLVGVSAACRIKKSCLCLATNAVSVDQWAFQFKLWSTIKDEHISRFTSDNKEKFRGMAGVVVTTYNMVAFGGKRSEDSEKIIEEIRNREWGLLLMDEVHVVPAHMFRKVISITKSHCKLGLTATLVREDERITDLNFLIGPKLYEANWLDLVKGGFIANVQCAEVWCPMTKEFFAEYLKKENSKKKQVLYAMNPNKFRACEFLIRFHEQQRGDKIIVFADNLFALTSYAMKLRKPMIYGSTSHVERTRILHQFKNSSDVNTIFLSKVQ

SEQ ID NO: 56178 - protein, 378 aa, Oryza sativa
MSEATAGHSSAAAAESAPDDVIAEILLRLPPHPSFLSRASLVCNRWRRLARDPGFLRRLRAFHRTPPVLGFFHNSPDLPRFVPAEGVPGRVAAEAASLRRDGDDGMWWCVDCRHGRALLRSRDWAELLVWDPMTGERRCITVSSQIQEGALDLNAAVFCAASGGGDQDCHSSPFHVVVVFTTGQCHGRVFACVYSSGIDAWGDPISTPVTSPCELYEEPPVLVGEALYWLLDGSRILEFEFGNQCLCLALIDHPVENHAILKRNIRLVRMEDDDVLGLAFVKDFSLHLWAREVADDGASQWIPRRAIELDMILPLEGYRCRAMPIWICGFAEDGDVVFIRTVAGVFLVWLDTLKFKKVSGSLLMKTVYSYTSFYVPNG

SEQ ID NO: 56179 - protein, 145 aa, Oryza sativa
MPKIKTSGVKYPDGWELIEPTLSELHSKMREAENDPHDGRRKCEALWPIFKINHQRSRYLYDLYYNRKEISQELYEFCLDQGHADRNLIAKWKKQGYERLCCLRCIQTRDHNFATTCVCRVPKHLREEQVIECVHCGCKGCASGD

SEQ ID NO: 56180 - protein, 162 aa, Oryza sativa
MGRSVYVAAAVALVLTSCSVLCLGAERFGARECEELGFTGLALCSDCNALAEFVKDQELVEDCRKCCTEDSDDSISKLTFSGAIIEVCMRKLVFYPEIVGFLEEDKDDFPYVEARYVYGSPPKLIMLDDKGDQKETIRIDNWKREHIRQFLKEKVKPVKSDS

SEQ ID NO: 56181 - protein, 389 aa, Oryza sativa
MGCFLSCFRGAGSDPAGSLRDPLVRESRIGEAFLDDETKVEASGTLDGDRGNGGSVDEELWREANYLKSCGAIGETPPEMLKGSNQITEEETNGELKGAAVSEENLSEGFNCDEHSALKHEQSDSPHPTPLVLRGDMQTPGTLNTAYKESLRSGKRARTNKQFIYPVLRPIENKLQWMELRDDSSPILSFNPPKRRYLSTDCSAKPQESITNSMATQTARITPASFSFHDITAGQDQGVISPEEHKSENDSRKLLDDADQLKYNADSERKGVASLSCWLKPPSSAGGSQSDTEGKVVKQRCYENSVFTDLPIFTASGLNWDNDKPTPVLPKVWDGNGIPNTTTKYKEDQKVSWHATPFEERLMKVLSDEKPHHQRKISGKLIQLDEETN

SEQ ID NO: 56182 - protein, 110 aa, Oryza sativa
MVMLLRRGLISAAFLLTLVLLFLLQLGIISTTVGCCSCCSFCGDEQQKQQQQQHGVGDLRPGRRLLIGHHQHQVVLAKGSMELKHAEEGGDVLDEEKREVLTGPNPLHNR

SEQ ID NO: 56183 - protein, 498 aa, Oryza sativa
MDDDTAGHASGGYTTTAAAHFVLVPMMAQGHAIPMTDMARLLAEHGAARVSLVVTPVNAARMAGFAAGVEEAGLPVQLVELPFPAAEFGLPDGCENVDMLPSKDLFSNFLLACGALREPFAARLRQQRPPASCIISDMIHSWAGDIARELGVPWLTFNGSCTFSSFARDIIYRKNLLENLTDDEIVKVSGFPTPLELPKARCPGTLCVPGLKQISDKIYEAETRSDGRIMNSFQEMESLYIESFERTIGKKIWTIGPMCLCHRDSNAMAARGNKASMDDAKCLQWLDSKKPGSVIFVSFGSLSSTDPQQLVELGLGLEASKKPFIWVIKAGKKFPEVEEWLADGFEERVKDRGMIIRAWAPQMMILWHQAIGGFMTHCGWNSTLEGISVGVPMITWPHCSEQFVNEKLVVDHLKIGVEVGVKGVTQWGTEQKEVKVTRTAVETAVSMLMDEGEVAQEIRMRAKDFGMKARRALEEGGSSYNNIKLLIQEMGNKQNASG

SEQ ID NO: 56184 - protein, 640 aa, Oryza sativa
MARGGGAAGVSMAHHLGIALVVLVFAAMAQVARGGGGGHDYGMALSKSILYFEAQRSGVLPGSQRIAWRANSGLADGKANGVDLVGGYYDAGDNVKFGLPMAFTVTMMAWSVIEYGEEMAAAGELGHAVEAIKWGTDYFAKAHPEPNVLYAEVGDGDSDHNCWQRPEDMTTSRQAYRLDPQNPGSDLAGETAAAMAAASLVFRSSNPGYADQLLQHSKQLFDFADKYRGRYDNSITVARNYYGSFSGYGDELLWASAWLYQASDDRRYLDYLANNADALGGTGWSINQFGWDVKYPGVQILAAKFLLQGKAGEHAGVLQGYRRKADFFACSCLGKDAADNVGRTPGGMLYHQRWNNIQFVTSASFLLAVYSDHLAGGAVRCSGGGGAVAGAAELLAFAKSQVDYILGSNPRGTSYMVGYGAVYPRQAHHRGSSIASIRASPSFVSCREGYASWYGRRGGNPNLLDGAVVGGPDEHDDFADERNNYEQTEAATYNNAPLMGILARLAAGHGARARGRLGQSLQHGIAANHTSLPHGANHQHASPVEIEQKATASWEKDGRTYHRYAVTVSNRSPAGGKTVEELHIGIGKLYGPVWGLEKAARYGYVLPSWTPSLPASESAAFVYVHAAPPADVWVTGYKLV

SEQ ID NO: 56185 - protein, 217 aa, Oryza sativa
MLLRRQRLCCRPLCWPWRRRSRRRSRRCSPTCCLEVGRPGDAAAAAGLTRRRWGAGASAATRASGRVGTRPPTATSSTASSTPPRRQTRRRRLRGGCKCHQGGGCQRGTPPPRLWLRWRGGRRLRGRWRRRGGGGRGRQHGRRCGRRDDVERGRLQQQQQQQRREEHGGEAGALHRGEGVGSLELSSSSSCSCCSPCSCRLGEGRRRPRRSGQGQYQ

SEQ ID NO: 56186 - protein, 565 aa, Oryza sativa
MGSCYSAYASSRKLRGRISKISLVIPDPVPDAEAASPRKDGVDGDGDDVRGGGGGCDDGGDVVAIATTTADEFARRYVLGKELGRGEFGVTRRCSDAATGEALACKTIRKHRRLAPPRVTAAKAAAAHGEDVKREVAIMRRMSSASSSRGGGAASSAAVVRLREACEDAADGSVHLVMELCEGGELFDRIVARGHYSERAAANIFRTIVDVVQLCHSNGVIHRDLKPENFLFANKSEDSPLKVIDFGLSVFFKPGDRFTEVVGSAYYMAPEVLRRSYGPEVDVWSAGVILYILLCGVPPFWGDNDEKIAQAILRGAIDFNREPLPRVSANAKDLVRRMLDPNPSTRLTAKQVLEHPWLKNADTAPNVSLGDAVRARLQQFSAMNKFKKKALGVVARNLPGEEVDKYVQMFHHMDKDKNGHLSLDELLEGLHINGQPVPEPEIRMLLEAADTDGNGTLDCDEFVTVSVHLKKMSNDEYLAAAFNYFDKDGSGFIELDELREEVGPNEQAILEILRDVDTDKDGRISYQEFELMMKSGADWRNASRHFSRANFSTLSRRLCKDTLTP

SEQ ID NO: 56187 - protein, 542 aa, Oryza sativa
MNTPLASIHRSTCRQPSLLPSRSMAMDTYYYSMLFVLPPILYMSYHLTRILADKKKPTTHGLKAHPLLGHLPAFVNNSHRFLDWTTELIVGSPEMRMGFWIPGMRTGIITGNPADVEHILRTNFANYPKGEHAIGMLEDFLGHGLFNSDGEQWLWQRKNASYEFSNRSLRRFVVDVVQAEIADRFLPLLRRAAGDGGGDGDVVVLDLQEVLQRFGFDTICMVAFGHDPRCLADGGVMEDARSEFMHTFGEAQDLVVGRFFDPIEVSWKIKKWLNVDTERRLRKAIADVHAFAMDIVRARRQSASVNDRDDVLSRFVASDEHSDEVLRDIVLSFLIAGRETTASGLSWFFWFLSSRPDVVARIADEVRAVREATGTRPGEPFRFDALREMHYLHAALTESMRLYPPAPIDSQSCAADDTLPDGTLLRAGWSVTYSAYAMGRLAAIWGEDCLEYRPERWLGDDGAFQPASPFRFTVFHAGPRMCLGKEMAYVQMKSIVANVLEEFEVDVVKDVAGGGVPEHVLSVTLRMKGGLPVKIRRKTEAY

SEQ ID NO: 56188 - protein, 627 aa, Oryza sativa
MRSKLFRSLLTDVLDGFLPLAVGFRRAHPLPPPAASATLLRKAAVQALERWHHLFGAHYRQLRLAVEYLKESARVQFPGLRAAVEARAAREARTQEILTAKVEQLRRNLAAIKAEIRSAIDEIRNGLDIIRIESEKFNNYANDEDEEQEIASLAMRSIRMASLMAGEWVPETQENEAVFDALRESYRLLVSKHLVTVQEWISVLVRVNLADNRFRDSALKEFIDVKNEIRAVRNRCSELGLNLDNVHRRKGVQEEEDDDFWVEGNIEVPSPGRVGTSADVASSSKDTRKGKKPVGGTDTDDGKAPNAGNSPQELDPERAKLHAEAPVLPWSSVLDRWGSNRDALVNQRGLELESHWGRVDNDAVIPAAKIAELNVHSSIYREDPVEILPCLAPLKKGGLCQRRDLKICPFHGPIVPRDAEGNPIHQSDGHCDAEGNPVGQTDGHYDAAVSPIDPNEDSSDVRENMIMPDGSSDGECIYESSPSRTANINNDISDSDVGHDLGKITVEQLARQAVQNVRKRDRDDKKALEKAQRARIRQHNQDVLREAALASTSRSAADYDLPSPAVSRRGRRGKTKGPTLASMLKKKVTSKDRIAERLLNARARDATIREVSHTEDMSYREAFPNQW

SEQ ID NO: 56189 - protein, 132 aa, Oryza sativa
MAAGGGGGDELKLLGLWASPYVLRAKFALSFKGLSYENVEEDLHNKSELLLSSNPVHKKVPCSSTTASPSASRRSSWSTSTRRSLTPASPFSPPTLTTAPSLASGPPTSMTSSCRRGRRRRWASRRRRRRRR

SEQ ID NO: 56190 - protein, 735 aa, Oryza sativa
MPSIRAPASKQTATLQVAVKCRPLTDSEQRRSRHIIQVIDDKNVVVLDPDLSKDYLELIQNRTKERRYSFDHVYAPGCSNADVYKNISSTIAGVVQGLNATVFAYGSTGSGKTYTMVGTHSDPGLMVLSFRTIFDLVKKDDSKDTFEVSCSYLEVYNEVIYDLLEKSSGHLELREDPVHGIMVAGLRSIKVHSADKILELLNIGNSRRKTESTEANSTSSRSHAVLEITVKRKQKGQYGSQVLRGKLALVDLAGSERASETNNFGQKLRDGANINRSLLALANCINALGKQNKKGLAYVPYRNSKLTRILKDGLSGNSRTVMVATISPADDQYHHTTNTLKYADRAKEIKTHVHKNIGHLDTHVEDYKRMIDNLQVEVSQLKKELAEKEHQLSVKPTEKAADNELSWLNILSQETGENVQERINLQKALFELEETNKRNRMELQHLDDAIARQQVKDKDSAVLQALTSRRQVILDNIRDNDEAGAGYRKDIELNESRKRQLQDMIEEATSNNGNRTYLHILSQYRLLGMTNAELQIEMAMRDQVIYNQRESLRSLWNIIYGTGLNQKQISKLAAKQGLTIEGCPLPVSSPDVTTPPSFSPHGRLSPFMSFPSPQSQPYSPSACFVQHGFSTMSYLRNQHETPTVCRQEHLSSYYMMSECSPFDGDGKQKTNGRSMPYFSTPGKPKEMYNFSPGTESERTPCSKEYPTSYSRNGDSLVQIKVNSLPLYTKTMIGNL

SEQ ID NO: 56191 - protein, 974 aa, Oryza sativa
MAEVSAAMGSNRSVRKKLAALLSDERKDFIRVRSKVKPLIDALESVHACFEKLSLEDEKNLDALQEAWMMDLRELSYDMEDSLDRFLVKSAAEPGSCKKLFKILLTKIKGSTNGIVKVIQDIKMPVEELNERMNRFKLSDDRHVTYDPIKIDSRVTALYVDASHLVGLDGPKLELIKMLRIEDEPEPSKKLVVVSIVGLGGLGKTTLANQVYHHLKPEFDCSAFVSVGQNPDVLKILDNILSGLTHQPYATTGSTVQVLVEKTRRFIADKRYLVLLDDIWNARDWDILRCSLPNNHLGSRIITTTRIVDVARSCCSHKEDHIYKMGPLSDLDSQRLFFRRIFGSDDGCPTQLKRISMDILKRCRGLPLATLTLASILADVPMLAEKWKQVHNSIGLATPGENMNRILSLSFHDLPNHLKTCLLYLSIFPEDYVIEREQLVWRWIAEGFIPETRGIPLEGVGSAYFNELINRSMIQPADVQYDGTVQSCRVHDMILELIVSISTKINFVAVLHKDQDETRFTDYKTKVRRLAHQSNCIEKLLERMSRDDLSHIRSIISFDYVKGIPHLGDFQALRVLDLGSCRSIENHHIENLEMLYQLKYLDLSRTSISELPMQIDNLRYLETLDLRGCAIEKLPASTVRLQNMQRLLVNRSVKFPDEIGHMQALQTLLFVSMSCNSIKFVEELSKLIKMRVLNITFSKPVDMVDEVRKYTDSLVSSLNELFNLESLKIDPEEGCSLDSLMGVYLTFGCLKKLVIGYISRIPKWINPSMYNLVHLELKVDIVREEDLHSLELLPCLLYLQLEMTDGSSKMLTVGSEGFRCLRESQFIWKNDGMGLVFLEGAMPELQTLHLYFRTHETIANYSGVDGNGIENLSRLKKLCVDVDCSGSTREEVEAAEDSIRKAADRHRTKLTLEIRRWCEACMIEEEAHDGNAEFPSRSVNRRANPVRVAFRVRADRRNRNRTRRNRITAPSAST

SEQ ID NO: 56192 - protein, 991 aa, Oryza sativa
MMKQAQQQPPPPPASSAATTTTAMAAAAAAAVVGSGCEGEKTKAPAINSELWHACAGPLVSLPPAGSLVVYFPQGHSEQVAASMQKDVDAHVPSYPNLPSKLICLLHNVTLHADPETDEVYAQMTLQPVTSYGKEALQLSELALKQARPQTEFFCKTLTASDTSTHGGFSVPRRAAEKIFPPLDFSMQPPAQELQARDLHDNVWTFRHIYRGQPKRHLLTTGWSLFVSGKRLFAGDSVIFIRDEKQQLLLGIRRANRQPTNISSSVLSSDSMHIGILAAAAHAAANNSPFTIFYNPRASPTEFVIPFAKYQKAVYGNQISLGMRFRMMFETEELGTRRYMGTITGISDLDPVRWKNSQWRNLQVGWDESAAGERRNRVSIWEIEPVAAPFFICPPPFFGAKRPRQLDDESSEMENLLKRAMPWLGEEICIKDPQTQNTIMPGLSLVQWMNMNMQQSSSFANTAMQSEYLRSLSNPNMQNLGAADLSRQLCLQNQLLQQNNIQFNTPKLSQQMQPVNELAKAGIPLNQLGVSTKPQEQIHDASNLQRQQPSMNHMLPLSQAQTNLGQAQVLVQNQMQQQHASSTQGQQPATSQPLLLPQQQQQQQQQQQQQQQQQQQQKLLQQQQQQLLLQQQQQLSKMPAQLSSLANQQFQLTDQQLQLQLLQKLQQQQQSLLSQPAVTLAQLPLIQEQQKLLLDMQQQLSNSQTLSQQQMMPQQSTKVPSQNDGLLHQNFPMSNFNQPQMFKDAPPDAEIHAANTSNNALFGINGDGPLGFPIGLGTDDFLSNGIDAAKYENHISTEIDNSYRIPKDAQQEISSSMVSQSFGASDMAFNSIDSTINDGGFLNRSSWPPAAPLKRMRTFTKVYKRGAVGRSIDMSQFSGYDELKHALARMFSIEGQLEERQRIGWKLVYKDHEDDILLLGDDPWEEFVGCVKCIRILSPQEVQQMSLEGCDLGNNIPPNQACSSSDGGNAWRARCDQNSGNPSNGSYEQFE

SEQ ID NO: 56193 - protein, 391 aa, Oryza sativa
MIRRRHRPTSPAPPLDNDDLLSEILLRLPPLPSSLPRASLVCTRWRRLVSDRGFLRRFRARHRKPPLLGVIQVCAYPIFAPALDPPDRIPAARFSWRLDNRHDLNDLLGVRHGRALVHVNTCRYSQRRLIVWDPVAGDRRAVAIPGGFRDRGVVVRAGEVRCVAGDGDPGHVHGGCHSSPFEVVILGTNKNRTHAFACVYSSETGIWGNVISAAVNFGDCICNFTTLVGNSLYCLLLGEQRTSFFQFDLDKQITAQIDVPPDMHPDGNGHHRFGDTICRFAPAENGGLLFLVVTHYTLNVWKSETNADGVAGWVLEKTIELDRLLSLEPGPQKTAPMLLGFSEEHNVAFVCTYIGVSMIHLESKEFKSVSQRMSLIYHPFTSFYTKELSPH

SEQ ID NO: 56194 - protein, 329 aa, Oryza sativa
MPNRATHWCYACRRPIRVSGQDITCPNCNDGFIQEISEIGGSLNTYGIFDPSFDERRDRSFGMVEAMSDLMRQRMAEMGRNRVLDFHGTRGASSHQGRQPTVRPMLIFGSNAPDRVSSSSEEADILLRQGRRIGADRPNFSRFLVGPSLEALFEQLLLHNNRQGPPPAPQSAIDSMPVVKINLRHLRDDPHCPVCTDKFEVGTEAREMPCKHLYHAECIIPWLVQHNSCPVCRHPLPSSSHRSGSTRSSSTHSNEAISHGVARSDADPVPVARSDDSRNHEMHGSFSFLWPFDSPTPDSSSYTHEGGVGEPTVHDDAGQMTYSEWHYDY

SEQ ID NO: 56195 - protein, 492 aa, Oryza sativa
MAVASRLAVARVAPDGGAAGRRRRRGRPVVAVPTAGRGRGGAVAASPPTEEAVQMTEPLTKEDLVAYLVSGCKPKENWRIGTEHEKFGFEVDTLRPIKYDQIRDILNGLAERFDWDKIVEENNVIGLKQGKQSISLEPGGQFELSGAPLETLHQTCAEVNSHLYQVKAVGEEMGIGFLGIGFQPKWALSDIPIMPKGRYEIMRNYMPKVGSLGLDMMFRTCTVQVNLDFSSEQDMIRKFRTGLALQPIATAIFANSPFKEGKPNGYLSLRSHIWTDTDNNRSGMLPFVFDDSFGFERYVDYALDIPMYFVYRNKKYIDCTGMSFRDFMVGKLPQAPGELPTLNDWENHLTTIFPEVRLKRYLEMRGADGGPWRRLCALPVFWVGLLYDEESLQSISDMTSDWTNEEREMLRRKVPVTGLKTPFRDGYVRDLAEEILQLSKNGLERRGYKEVGFLREVDAVISSGVTPAERLLNLYETKWQRSVDPVFQELLY

SEQ ID NO: 56196 - protein, 228 aa, Oryza sativa
MADEVVLLDLWVSPFGQRCRIALAEKGVEYEYSEQSLADKSDLLLRSNPVHKKVPVLLHAGRPVCESLVILEYIDETWPPEPEKKKESPRLLPSDPYARARARFWADYVDKKLFDCQTRLWKLRAGDAAHEQAKRDMAEALGTLEAELGEGDYFGGEAFGYLDVVLVPFVAWFHAYERLAGFAVAEICPRLVAWGERCKGRDSVAKTLTDPEKVYEFALYLKAKFGAK

SEQ ID NO: 56197 - protein, 194 aa, Oryza sativa
MAQQWRSLLFLLLLLLVPFAAAAGQDAPFVVAQKKVALSRPGPGVERLAVTLNLYNQGSATAYDVSLNDDSWPQEAFQLISGTTSKIVEKLDPGATASHNFILETKVQGKFQGSPAIITYRVPTKAALQEAYSTPMFPLDILAERPPQQKFELAKRLVGKYGSLVSVVSFVGVFIYLVASPSKSTAAKGSKKRR

SEQ ID NO: 56198 - protein, 71 aa, Oryza sativa
MEEMKNKLGEGMLHIQAVLDVVNPDHFKDHSVMLDRWFWKLRDAIEEAEDAIYLHKNIKSKQSPQKNIYKE

SEQ ID NO: 56199 - protein, 724 aa, Oryza sativa
MDEPSPRGGGCAGEPPRIRRLEESVVNRIAAGEVIQRPSSAVKELIENSLDAGASSVSVAVKDGGLKLIQVSDDGHGIRFEDLAILCERHTTSKLSAYEDLQTIKSMGFRGEALASMTYVGHVTVTTITEGQLHGYRVSYRDGVMENEPKPCAAVKGTQVMVENLFYNMVARKKTLQNSNDDYPKIVDFISRFAVHHINVTFSCRKHGANRADVHSASTSSRLDAIRSVYGASVVRDLIEIKVSYEDAADSIFKMDGYISNANYVAKKITMILFINDRLVDCTALKRAIEFVYSATLPQASKPFIYMSIHLPSEHVDVNIHPTKKEVSLLNQERIIETIRNAIEEKLMNSNTTRIFQTQALNLSGIAQANPQKDKVSEASMGSGTKSQKIPVSQMVRTDPRNPSGRLHTYWHGQSSNLEKKFDLVSVRNVVRSRRNQKDAGDLSSRHELLVEIDSSFHPGLLDIVKNCTYVGLADEAFALIQHNTRLYLVNVVNISKELMYQQALCRFGNFNAIQLSEPAPLQELLVMALKDDELMSDEKDDEKLEIAEVNTEILKENAEMINEYFSIHIDQDGKLTRLPVVLDQYTPDMDRLPEFVLALGNDVTWDDEKECFRTVASAVGNFYALHPPILPNPSGNGIHLYKKNRDSMADEHAENDLISDENDVDQELLAEAEAAWAQREWTIQHVLFPSMRLFLKPPKSMATDGTFVQVASLEKLYKIFERC

SEQ ID NO: 56200 - protein, 196 aa, Oryza sativa
MGKFRKLGRHAAHRVSMLRTMVSQLVKHERIETTVAKAKEVRTKADQMVQLGKEGTLDAARRASAFVRGDNVVHKLFTELAYRYKDRAGGYTRLLRTRIRVGDAAPMAYIEHSKKKSSVSFTKSRIAEGLSTGRMNFERQNLQHHSHLSGSLLIHGPSHSPANNGQVLKSARTPEQKAYDKPERSLALFYVVERFF

SEQ ID NO: 56201 - protein, 194 aa, Oryza sativa
MVVGAGAARPPRRRRGSGRGGAITGASRRSTSTSSTAIPRPTTSPSEAQAQQPNTTAAKTNAGAASGKARAVAAAAANNNNNAVAATNASAMFAAKNAAADAATNAAAGARGKGRVGGGKKAAAAGAATNGGGAKAARGGVRSLLMSPLRGGGACGMGEVDVRAEVFIRKFREEMRLQNQKSAEEFQAMLARGL

SEQ ID NO: 56202 - protein, 380 aa, Oryza sativa
MGQDLAEIHPRELQFTFEVKKQSSCTVHLVNKSNEYVAFKVKTTSPKRYCVRPNTGVILPRSTCDFTVTMQAQRTAPPDMQLKDKFLVQTTVVPYGTSDEDLVPSYFSKESGRYIEESKLRVVLVSASHPFGEQPINGIPNTEAAVEVPSLKDTLNIKNEIPVAEKEVHSPLEEDPVVIPAPPYPVKEAPILREVPVHISPVRETSFLREVPAPVSPVKETPILREVPTPLKETPVILTESPPPPTDTSSITVESLHPFEQNLASLKESPLEETLPKAAVVLSEQGAVNVQSRQLCHVTEDVQNLKSKLNGLEVKLEEAEKMIIKLREESRTTTQERDKLQQEMMFLRKKGTPRNQVGFPLLFVVYVALLGTSLGYLLRL

SEQ ID NO: 56203 - protein, 119 aa, Oryza sativa
MERRPPNRLDWQANKRRATEQGGGDWGARGGGDWGACGAREEEELHRQLLAQNPRANQGAQWKPQGLPGTDGERGARAPKIKCFKCGREGHHQAARPNPSLCYSCHSSVEEALSSWGGN

SEQ ID NO: 56204 - protein, 343 aa, Oryza sativa
MFGFGHHHNQAPAAPSDPNQIFKIFCRANENYCLTVRDSAVVLAPVNPKDEHQHWFKDMRFSTKVKDGEGMPAFALVNKATGLAVKHSLGQSHPVKLVPFNPEYEDASVLWTESKDVGKGFRCIRMVNNTRLNLDAFHGDKDHGGVRDGTTVVLWEWCKGDNQSWKILPWGPEAHSSSPGAATACTIGGVPVHTVRVFSAAGEDYCLTVRNGTACLAPKNPRDDYQHWIKDMRHSNKIRDEEGYPAFALVNKVTGEAIKHSTGQGHPVKLVPYNPEYQDESVLWTESKDVGKGFRCIRMVNNIYLNFDAFHGDKDHGGIHDGTEIVLWKWCEGDNQRWKILPW

SEQ ID NO: 56205 - protein, 98 aa, Oryza sativa
MPRSGSGLAPVVGRSAGSISSVVRSSRLALSGARQVACAFQDLLGTSSCRSHHPSLPAPHPIIDGGVDFGGRAGLADELHGGSKQMATSTATWIQARA

SEQ ID NO: 56206 - protein, 173 aa, Oryza sativa
MARWLQLPCSLLLVIMLVAATAAAADVVVRDDEKCAACGLPSPCGTTCTYASPPPPDVLPTPVYYPPPPPVYYPPPSPPPVAYPPPTTPSTNCPPPPYGGGGYNPTPSYNPTPGYNPTPSGWFTPQNMPSCLEPRGTLYPQDPGFRPNAAAGGAASWRAVVLPAAAVAGALAL

SEQ ID NO: 56207 - protein, 761 aa, Oryza sativa
MRFRMLFETEDSGVRRYMGTITGIGDLDPVRWENSHWRNLQVGWDESTASERRTRVSIWEIEPVATPFYICPPPFFRPKLPKQPGMPDDENEVESAFKRAMPWLADDFALKDVQSALFPGLSLVQWMAMQQNPQMLTAASQTVQSPYLNSNALAMQDVMGSSNEDPTKRLNTQAQNMVLPNLQVGSKVDHPVMSQHQQQPHQLSQQQQVQPSQQSSVVLQQHQAQLLQQNAIHLQQQQEHLQRQQSQPAQQLKAASSLHSVEQHKLKEQTSGGQVASQAQMLNQIFPPSSSQLQQLGLPKSPTHRQGLTGLPIAGSLQQPTLTQTSQVQQAAEYQQALLQSQQQQQQLQLQQLSQPEVQLQLLQKIQQQNMLSQLNPQHQSQLIQQLSQKSQEILQQQILQHQFGGSDSIGQLKQSPSQQAPLNHMTGSLTPQQLVRSHSALAESGDPSSSTAPSTSRISPINSLSRANQGSRNLTDMVATPQIDNLLQEIQSKPDNRIKNDIQSKETVPIHNRHPVSDQLDASSATSFCLDESPREGFSFPPVCLDNNVQVDPRDNFLIAENVDALMPDALLSRGMASGKGMCTLTSGQRDHRDVENELSSAAFSSQSFGVPDMSFKPGCSSDVAVTDAGMPSQGLWNNQTQRMRTFTKVQKRGSVGRSIDITRYRDYDELRHDLACMFGIQGQLEDPYRMDWKLVYVDHENDILLVGDDPWEEFVGCVKSIKILSAAEVQQMSLDGDLGGVPPQTQACSASDDANAWRG

SEQ ID NO: 56208 - protein, 510 aa, Oryza sativa
MSRTAIILHRFRQAAASQSLVETSLQSCPYFGVPLRWLSCTEQTSKWETSTSYQIDDVDQYSPISSVAKICTHPLSSHVNHCYHHSRSLGFSSVSSSRRMYSSDARAKPEDYKNAMAKVSSTETSEVGATDHSGNTWIDILDSARHSTIDATAAALKKLKAMTDPIVPCIQELYATYPDLQRMVIPLGGTLMGTAVAWFVMPIVLRKLHKYTSENPLITLEGESTKKYMSYQTSLWSALEDPAKCIITFMAFSQMAAIVVPSISVYLPQAWRGTFVVSLLWFLQKWKTNFIANIMTNQSAIGMDRDRLLTFDKVSSLALIALGGMALAEACGVPVQSILTVGGVGGVATAFAARDVLGNILSGLSLQFSKPFLVGDNIKAGSIEGKVIEIGLTSTLLINPENLPVVVPNSLFSSQIIVNKSRAVWRARVVKIPVIIEDLEKIPTISEEIKVKLRSNPNIDAPYCYLSRLESSHGELTIGCNIKSMRRDEWTTVEQDILLKAASIVKQYES

SEQ ID NO: 56209 - protein, 302 aa, Oryza sativa
MATQATAREIAVVGVIGAGQMGSGIAQLAAAAGCGVLLLDSDTAALSRAVDSISSSLRRLVAKGQLSQASCEHSIEQIKCVSSVQELRDADLVIEAIVESEDIKKKLFVELDKITKPSAILASNTSSISITRLASATNRPCQVIGMHFFNPPPIMKLIEIIRGADTSEEVFTKVKSFSERLGKTVICSQDYPGFIVNRILMPMINEAFWALYTGVATKEDIDTGMKLGTNHPMGPLQLADFIGLDVCLSVLRVLHNGLGDSKYSPCPLLVQYVDAGRLGKKRGQGVYSYRTRSSSIKPRSSL

SEQ ID NO: 56210 - protein, 85 aa, Oryza sativa
MLVAAVENFFFFLAACSSSAFLLGFVLSDLLGVFMSSIIAWSLAPVNCEFMRGVRVKGIFKLASCLQNVWMCLLFQNPCQGAAQI

SEQ ID NO: 56211 - protein, 41 aa, Oryza sativa
MFLNMHMMFSIECCRNSPPPCSSSNFVIDGWNVLRQCVSAN

SEQ ID NO: 56212 - protein, 104 aa, Oryza sativa
MIFMLIIIPIYDVLPSGWMMILPMILPQVMQLLPQAYCLCLLNHETSTTIRDSNCKRPSRKSLVGIICSIQIYLRLLEQIICSCTITLSLLSENHKNFCCWVLH

SEQ ID NO: 56213 - protein, 76 aa, Oryza sativa
MRKFYEGGFQPTMTRREAGLILGVRENAHPEKVKEAHKKVMVANHPDAGGSHYLASKINEAKDILLGKTKGGGSAF

SEQ ID NO: 56214 - protein, 628 aa, Oryza sativa
MAAAAISHLRRGAPRHARALLYLSTRRFSSSSAAGVAPLAAVAASARRLLSTSVDSGASSTGESYKPPLFDPFRAASLASSAPPLESPPIEELPDDATPPPEEEPGLPAPEKDPVATACQHELEGLKAWVETVRSRKESTEEKEAWSLLGRSVVSYCGTAVGTVAANDPSTANQMLNYDQVFIRDFVPSAIAFLLKGEGDIVKNFLLHTLQLQSWEKTVDCYSPGQGLMPASFKVRSIPLDGNSEAFEEVLDPDFGESAIGRVAPVDSGLWWIILLRAYGKITGDYALQERVDVQTGIRLILNLCLSDGFDMFPTLLVTDGSCMIDRRMGIHGHPLEIQSLFYSALRCAREMVSVNDGSNSLIRAINYRLSALSFHIREYYWVDMKKINEIYRYKTVEYSHDAINKFNIYPEQIPSWLADWIPEKGGYLIGNLQPAHMDFRFFSLGNLWAIISSLATQRQAEGILNLIEAKWEDIIANMPLKICYPALEYEEWRIITGSDPKNTPWSYHNGGSWPTLLWQFTLACIKMGRRDLAQRAIEVAEKRLSEDKWPEYYDTRTGRFIGKQSRLYQTWTIAGYLSSKMLLDCPELASILICEEDLELLEGCACSVNKSARTKCSRRAARSQVLV

SEQ ID NO: 56215 - protein, 245 aa, Oryza sativa; identical to SEQ ID NO: 32923

SEQ ID NO: 56216 - protein, 482 aa, Oryza sativa
MEKSELLLGSYSYAALCGVTLIIGWLAHWVYKWMNPPCIGRLPPGSMGFPIIGETFQFFRASPSIDMPSYYKQRLERYGPLFKTSLVGRPVIISLDPEVNRFIFQQEGKLFQSWYPETAINIFGKKSLTTYNGTIHKFIRGVAAKLFGLENLKESLLPELENSMRESFASWTGKPSVEVQDGVSDMIFDLVAKKLIGLDVTNSRELRKNFQDFFQGMVSFPIYFPGTSFYRSMQGRRNVRNTLTDIMKERLSAPGKKYGDLVDLIVEELQSEKPMIDENFAIDALAALLFTSFATLSSTLTVAFKYLTDNPKVVEELKEEHGTILKKREGVNSGFTWEEYRSLKFSTQVMNEITRISNVTPGVFRKTLTDVQVKGYTIPSGWLVMISPMAVHLNPKLFEDPLKFDPWRWREEKRSSMLKNYMPFGGGVRLCLGAEFSKLFIALFLHILVTEYSWTEIEGGEVLRISEIMFPQGYHIQLVPQT

SEQ ID NO: 56217 - protein, 232 aa, Oryza sativa
MLSGDIPPNQTVYLRNLNEKVKKEELKRSLYALCSQYGRILDVVALKTPKLRGQAWVVFSEITAATNAFRGLQEFDFYGKRMRVQYAKTRSDCLATEDGSTAPKEKRKKQEEKAAEKKRRAEEAQQSGPNAAAQSNGTGYQASRLGKTSQEPPAPPNNILFIQNLPAETTSMMLQILFQQYPGFREVRMIEAKPGIAFVEYEDDSQSMVAMQALQGFKITPYNPMAISYAKK

SEQ ID NO: 56218 - protein, 106 aa, Oryza sativa
MGNAGSSPEQAAGNNKEDAEARRQPPSTVRFYPSADQPKARQPPPIKLEEEDVPPPPVADEEMAPRNLWQVYALGAFIVLRWAWVKWKESKERDDSPDGRSPDGSS

SEQ ID NO: 56219 - protein, 283 aa, Oryza sativa
MSPAEPRPPAAATRKRKKPHKPTKTLAKNPTNPVSTKAKKKKPPPPSKADQSASAAAAGGVLLSAEMPPARQLEFLLRSFERAAKMRLSPLELDAYSEGCMVPLAEGASQDVEGFGDHVKGAFGSSWKEELCEGELDGGAVDAGSPALLVICSAALRSLELLRGLKMFTKECRPIKLFAKHMKVEEQVALLKTRVNIACGTPSRIKKLIDMEALSLSRVKLVVLDMQRDAKSFTLFTLPQVSNEFWDLYKGYLDQKVRGGDTRLCFYGAVSEKDVKKALPSAE

SEQ ID NO: 56220 - protein, 377 aa, Oryza sativa
MADGEDIQPLVCDNGTGMVKAGFAGDDAPRAVFPSIVGRPRHTGVMVGMGQKDAYVGDEAQSKRGILTLKYPIEHGIVSNWDDMEKVWHHTFYNELRVAPEEHPVLLTEAPLNPKANREKMTQIMFETFNVPAMYVAIQAVLSLYASGRTTGIVLDSGDGVSHTVPIYEGYALPHAILRLDLAGRDLTDSLMKILTERGYSFTTSAEREIVRDIKEKLAYVALDYEQELETAKNSSSVEKSYELPDGQVITIGAERFRCPEVLFQPSMIGMEAAGIHETTYNSIMKCDVDIRKDLYGNIVLSGGTTMFPGIADRMSKEITALAPSSMKIKVVAPPERKYSVWIGGSILASLSTFQQMWISKDEYDESGPAIVHRKCF

SEQ ID NO: 56221 - protein, 623 aa, Oryza sativa
MASPPTTAAADPGRRRRLLLVVVVLLLLLLPLVASAAAVPHRHRLPSHHLASLKLNASAPPTTYFEVDRPIRPPRGSVGPCSTLLLSNSFGATYGRPPVTAAYAPPSCLAGGGGGGGGASSIALAVLEWSADCRGRQFDRIFGVWLSGAELLRSCTAEPRATGIVWSVSRDVTRYAALLAEPGEIAVYLGNLVDSTYTGVYHANLTLHLYFHPAPPPPPPPQQADLIVPISRSLPLNDGQWFAIQNSTDVQGKRLAIPSNTYRAILEVFVSFHSNDEFWYTNPPNEYIEANNLSNVPGNGAFREVVVKVNDDIVGAIWPFTVIYTGGVNPLLWRPITGIGSFNLPTYDIDITPFLGKLLDGKEHDFGFGVTNALDVWYIDANLHLWLDHKSEETTGSLISYEAQGLVLNVDSGFSGLDGQFVTSASRHISATGLVKSSYGEVTTNFYQRFSYVNSNVYSKNGSVQVVNQTIDAKSGVFAKDALAVLLSEELHQIFPLYVYTGTSDEEADEYTLISHVKLGVNEKETSGGKMGFSYNSLRNAQSAHGSMKVKKNLVVGGLGETHQAYKYVGADGCYFRDVRSKNYTVLSDHSGDSCTKRNPYNGAKFSLRNDQSARRKLMVNNL

SEQ ID NO: 56222 - protein, 268 aa, Oryza sativa
MDASSPFSFHELRRQASSYLTDKIRSARLALTDVTPTQLMTEEATSGDASPPNVKTMSLIARQAFEIDEYVRISDILHKRFARFDRRQWREAYKALLLLEHLLTHGPRSVALEFQRDREVIEQMVSFQHIDEKGFNWGMTVKSKSERVLRLLERGPFLEDECERARKIAHEIKGFGSFNLSSAHASGSAAAALRAGAMEHQCYGRSNSRYEGRWRREACVDDGDKENLLVVSMAEAKAEAAAEEPHHYHHPFYGFGQQRPEAMLLLSQ

SEQ ID NO: 56223 - protein, 271 aa, Oryza sativa
MWAASPAFRRRLFLLRSLSPSPCAALPGNAACSSSPSPSTSIRVNAMSASGPVYEADAEAVVRRITPPLDRARHKGQAGKIAVIGGCREYTGAPYFAAISALKVGADLSHVFCTRDAATVIKSYSPELIVHPILEESYSVSDGERESVSSRILTEVAKWMERFDCIVVGPGLGRDSFLLDCVSNIMRHARQANIPTVVDGDGLFLITNNLSLVEGNLLAILTPNVYEYKRLVQKVLNCEVNEENASEQLTALCQKNRWHNHHAERKSRYNQ

SEQ ID NO: 56224 - protein, 359 aa, Oryza sativa; identical to SEQ ID NO: 35256

SEQ ID NO: 56225 - protein, 99 aa, Oryza sativa
MKLSACLFIWFASTAGETLDSSVSSGHLGHRIRRQKLMEASFPSFGFDTFPELEPIIRLDTGGQSKVVEQLGHDNRRGSQPRYLSSSSSITDKSMLDVS

SEQ ID NO: 56226 - protein, 370 aa, Oryza sativa
MSSATDGAASRLGVAGALGMSVTSSVAIVICNKYLISTLGFFFATTLTSWHLMVTFCTLYVAQRLRFFEAKPIDAQTVISFGLLNGISIGLLNLCLGFNSVGFYQMTKLAIIPFTMLLETIFLSKKFSRSIKISLMVLLLGVGIASVTDLQLNLLGSIIAVLTIAATCVSQILTNQIQRRLKVSSTQLLYQSSPYQSAVLLVTGPFVDKLLTNRDVFAFTYTFQVVAFIVLSCSIAVCVNFSTFLVIGTTSPVTYQVLGHLKTCLILSFGYVLLRDPFTFRNVAGILVAIFGMGLYSFFSVSESRDKKLADGPSPPLPISSSQMAEMKDSEPLLGGGGGAAAKSSPWNEVKGLQSFDEVPRTAKSAFSRP

SEQ ID NO: 56227 - protein, 131 aa, Oryza sativa
MKCASAPGRDINLSTELKDYFKDIAQFLHPSNEFYVTTINPTFMKQDKVHFSKQFSMTYIALIVRKKTSQIEVRIPGHSSTTMVLHHSTEKRFNLKSGWTHFPTSNGIQVGTICIFHFHQTNQLQATIDVL

SEQ ID NO: 56228 - protein, 411 aa, Oryza sativa
MQVNKEAPLGCLKPISQYNLQEQRSNGFPENSEKKNDSIATERVLEASPLPNQGFFRPVQRTEYYAYPFIYADYQMPGQPQPYNLDNQFYQINRDHSFPIESRVQYLPFKMPPQGYPPDAQLQEFQYFVVIDFEATCDKENNPHPQEIIEFPSVLVNSATGQLEASFQTYVRPAYNQLLTDFCKELTGIQQIQVDRGVPLSEALLMHDKWLEEKGIKHKNFAVVTWSNWDCRVMLESECRLKRIRKPPYFNRWINLKVPFQEVFGGVRCNLKEAVQLSGLTWEGRAHCGLDDARNTARLLALLMHRGFKFSITNSLVWQSAPQSITCQSSPAHSPYPNQSHHKPMEVMGSPVQVNPYAGITVKKPMYCHCGVLSQIKVTYRPGPMHGRYFYGCGNWTSTRGANCDYWVWLS

SEQ ID NO: 56229 - protein, 399 aa, Oryza sativa
MAFAASPSLSSLAAASSSSSAASAAAVAISSSSSSPSNPSRELSPRLFSPLPPKPHSLSCSGPQAPRATTGDGSGAAGDRGSGSGGNSGKGGGGGSGSGGGDDDDDYEEAEFGPLLGFDEVLRLAAARGVSLPADMMEAAKDAGIREVLLLRYFDLQAGPWPLAAMIRAFSMLRNRMLADPSFLFKVGTEVVIDSCCATFAEVQKRGEDFWAEFELYAADLLVGVVVDIALVGLLAPYVRFGKASASTGPFGRFNRMAGSLPSSVFEAERPGCRFTVQQRIGTFFYKGVLYGSVGFVCGIIGQGIANMIMTAKRSVKKSDEDIPVPPLIKSAALWGVFLAVSSNTRYQIINGLERVVETSPIAKRVPPVAMAFTVGVRFANNIYGGMQFVDWARWSGVQ

SEQ ID NO: 56230 - protein, 230 aa, Oryza sativa
MARSKFVALSFVVLLGIGLTNATRVARYVSAGGGGGGGGGGGGSGNGSGWGSGSGSGYGQAGGSGGAYASGGGGGGGGGGGQNGGSGYGSGSGSGYGQAGGYGSHGGAYAQGGGQGGGGGGGANGGSGYGSGSGSGYGQAGGYGPHGGAYAQGGGQGGGGGGGYNGGSGYGSGSGSGYGQAGSYGPYGGGYAHAGGQGGGGGGGQSGPGGHGYGSGSGSGSGSAYSGGHP

SEQ ID NO: 56231 - protein, 193 aa, Oryza sativa
MFLWDWFYGVLASLGLWQKEAKILFLGLDNAGKTTLLHMLKDERLVQHQPTQHPTSEELSIGKIKFKAFDLGGHQIARRVWKDYYAKVDAVVYLVDAYDKERFAESKKELDALLSDDSLAAVPFLILGNKIDIPYAASEEELRYHLGLSNFTTGKGKVSLGESNVRPLEVFMCSVVRKMGYGDGFKWVSQYIK

SEQ ID NO: 56232 - protein, 367 aa, Oryza sativa
MVKKKEAGDAEADERRRLRSLAFSNGLLQRGEPAAPRSALAPSTAVSRLQGRDIVRRGGQRKSRFLFSFPGLLAPAAAASGGRVGELADLGTKNPLLYLDFPQGRMKLLGTHVYPKNKYLTLQMSRSTKGVVCEDVFESLIVFSEAWWIGTKEENPQELKLDFPKEFQNDGAVADSDFKGGAGASCDEAVTINKPPKETTTGSLSPKIESDIDSSEDSDLKDEDNTQSTSQAPSVRQSARTAGKALKYTEISSGDDSSDNDDEIDVPEDMDEKVKSPAVKNESQSEDIKPADSSAQPISAKKEPLVQATLSSMFKKAEEKKRCTRSPKGSPATKGPAAKKQRASPEEKHPTGKKSGKCSSKSVVRSV

SEQ ID NO: 56233 - protein, 379 aa, Oryza sativa
MGAAGAMERELLEAFEAARKAADAVGEAAAAAGAGEGESPEAARCVDALRRLRGARVTTAALVSTQIGRRIRYLTKHPHSSIKATASDLLGHWKKVVIEEDKKNGALQNGKSSSTVVKVEKVEPMKVEKASPRATVNNNNMDTRVVNHKGGKVEKFSNAELRTQSIKVEKVQKVVHKVSSVEKPSPVQGGPPRLTSVVKCGDASRDRIRAILGDAFSRVSEETRKDDREEVRNIIEEVKACDPFRIAVMVECALFQKLGNFNGPNKQRYRSLMFNLKDDHNTDFRRRVLLGQVQPERIADLTPTEMASDTRKLENKKIEEKALFECERGGAPKATTDQFKCGRCGQRKTTYYQLQTRSADEPMTTFVTCVNCNNHWKFC

SEQ ID NO: 56234 - protein, 108 aa, Oryza sativa; identical to SEQ ID NO: 32244

SEQ ID NO: 56235 - protein, 474 aa, Oryza sativa; identical to SEQ ID NO: 35629

SEQ ID NO: 56236 - protein, 746 aa, Oryza sativa
MSVMARPRFEEDDEDEFFDSREVMSPASVSSPASSGRYDGPMLEVWATDPCSVHERRQRFIKSLGLSDSSPSAGGGGDRPDEEPCSRSSAAEEILPCSPTVELVSAVPSFACRGEEPGASGGGGGAEVLDCVFKNLDDGTVFVVDEMGKDGSFRSLRDRRSNRTVTAAEFERTYGSSPFICELMRRVDDSDESSAVEKALVRGRRRRRRFGWLRRLGIRGCVVDVEEDDETNSTSSSSCRSCSGKVDRVKVRHYKKRSKELSAVYRGQDIKAHEGAIVTMKFSSDGQYLATGGEDGVVRVWRVVEGERPNELDFAEDDPSCVFFTVNENSELAPVNSSEGSKSKHYKNSKVSTDPACVVIPHRTFALSQEPVHEFYGHDDAILDLSWSKNRDLLSSSMDKTVRLWQVGCNSCLKVFSHTNYVTCVQFHPTSDNYFISGCIDGLVRIWDVRRCQVVDWADTKEIITAVCYRPDGKAAVVGTITGNCRHYDASENHLELESQVALNGRKKSPLKRIIGFQYCPSDPKKLMVTSGDSQVRILDGLHVISNYKGLRSSSQVAASFTPDGDHIISASDDSSIYMWNYANQIAPVTNHVKTVWSNEHFSCHDVAIAIPWNASQTRNSISLACSITSSQQEVLDEFHNEHDSSSCSHTEDSPDGDSLYQLPSGNFTLSSAFFAESAPRGSATWPEEQLPSNSTTQSTLRKSQYKFLKASCQNAATHAWGQVIVAAGWDGYIRSFQNYGLPVQV

SEQ ID NO: 56237 - protein, 1002 aa, Oryza sativa
MLRQPASTSGDVDRIANRKHRHIVPRRSTEKKNPHNIQFERQVAALEYRQEEQRKRANGGRLFFTLSLSSHLVENGDELETSASPSLLLFHFNDPEDLARCLTSSRALLEDSQQSDKAPDNDFSVNTFSNASVDVKRTSRKKSKKKNKRHKRVHGKKVSEASDTQSMQSKGASHCIDVAGGESLTLSSNHVAHAGSEMRCRKETFPSMADGGETLTLPPNHVADKLFGDLSSDSSVREVSAERPDSETGNDGSFITLISSTSCSDEIELSRHASYFECCEQSNSNNSRCLDSASTSTLTDSSLDGHYTDSSWNFSDDTENLLIDKNECPPCVQSKVTDLRGSKCGGSEGWLNKANHDKFSCFRNSADASSGTQEMQSCSNASSDGDFLPVISRKRARKNRKVQPLGGCNVEHICGVEHGQSGKQSKISSRPSNSCTQVASKDSTKDFIHPIKVRTWTPHEVTLNDYMIGANMNHLQDPKQNRRGKPHKYSCLSEVANCGFIEEKSACTAKMLPGITHSTETGVGQIASSSASDVTVREISEEICTPIGPVQKGGLQILLREENVVGTGSLDVLNHVSSVDSEEQKKVDNAVMSRSHGMEGHHLQSQDSGSQFPGCTTDYWKTSRPTESGLEVGYHGVSAFEGRCNTNQQRSVSSKLQLGEMIKAANDACKVQGASDVHLISGHPLADFETFIYSASPVIAKTSCMRNGNCLQDPQAGSSPYQYQISDVSLRNVWEWYEEPGSYGLEVEIHRSLNSTRSACGVSEFCAYFLPSLSAIQLFEQCKNNLDHKFDSDDDFLLSQPNGVYLPKPSLSVQDHGEPLFEYFESEHPSSRPPLFEKIKQLTSGENLSTCQIFGDPKMLENLKLRDLHPASWFCVAWYPICRIPQGNCRAAFLTYHSLGKVVPQIHSPDKADEPTHLVCPVVGFWSYNDKGEQWFQLRNPEIKPMSLDVGPKTDRAEVLKQRLKTLRHGASVMSSMVIPKANGEKSINRHPDYEFFLSRSN

SEQ ID NO: 56238 - protein, 231 aa, Oryza sativa; identical to SEQ ID NO: 36516

SEQ ID NO: 56239 - protein, 734 aa, Oryza sativa
MVCSVAATASLLPSPPPKPTALAADDHHARLRAAAARSDLPAALAAFVAMSSAGAPPVLRTFTSLLKLCAARGDLATGRAVHAQLAARGIDSEALAATALANMYAKCRRPADARRVFDRMPVRDRVAWNALVAGYARNGLARMAMEMVVRMQEEEGERPDSITLVSVLPACANARALAACREAHAFAIRSGLEELVNVATAILDAYCKCGDIRAARVVFDWMPTKNSVSWNAMIDGYAQNGDSREALALFNRMVEEGVDVTDVSVLAALQACGELGCLDEGMRVHELLVRIGLDSNVSVMNALITMYSKCKRVDLASHVFDELDRRTQVSWNAMILGCAQNGCSEDAVRLFTRMQLENVKPDSFTLVSVIPALADISDPLQARWIHGYSIRLHLDQDVYVLTALIDMYAKCGRVNIARILFNSARERHVITWNAMIHGYGSHGFGKAAVELFEEMKSIGIVPNETTFLSVLSACSHAGLVDEGREYFTSMKEDYGLEPGMEHYGTMVDLLGRAGKLDEAWAFIQKMPMDPGLSVYGAMLGACKLHKNVELAEESAQKIFELGPQEGVYHVLLANIYANASMWKDVARVRTAMEKNGLQKTPGWSIIQLKNEIHTFYSGSTNHQQAKEIYSRLAKLIEEIKAVGYVPDTDSIHDVEDDVKAQLLNTHSEKLAIAFGLIRTAPGTTIQIKKNLRVCNDCHNATKLISLVTGREIIMRDIQRFHHFKDGKCSCGDYW

SEQ ID NO: 56240 - protein, 189 aa, Oryza sativa
MNSKISDYGMAKIFEEESYEVNSGHVVGTYGYMAPEYAMEGVFSVKSDVFSLGVLVLEILSGQRNGAMYLQNNQQTLIQDAWKLWNEDKAAEFMDASLAGDYSKEEAWRCFHVGLLCVQESPELRPTMSNVVLMLISDQMQLPEPAQPPLFAAREMKKVSASEFSLAMKTETTKTQSVNDVSISMIEPR

SEQ ID NO: 56241 - protein, 619 aa, Oryza sativa
MDLASQGVVTQRQKPSGRRPVGSSQIWTRYGVLLPSQQTRKLKEWVLTDEQQQLVNASGLGHLALTTGFTIDRSLLTAFCERWNNETNTAHFMGFEMAPSLRDVSYILGIPVTGHVVTAEPIGDEAVRRMCLHFLGESPGDGEQLCGLIRLTWLYRKFHQLPENPTINEIAYSTRAYLLYLVGSTLFPDTMRGFVSPRYLPLLADFRKIREYAWGSAALAHLYRGLSVAVTPNATTQFLGSATLLMAWIYEYLPLTQPQQKNQNTLLPRACRWNFGGATRGQRKKVMEWRKVFDELQFSDVNWNPYKDMNPAIIPEYCIAADNICYSRTWLISFNIEEVYVPDRFSRQFGREQGRLHGVPMWARRTWSKWKDWRVEYAREIEEFHQLVGCRFTPAETNINSLPIESITKQDAAGCSRSTSQNFSSMVEDLRNDFPVIDRYLEGQLLPVEVASFLERVGMMIKSYSPPQSSRKKDQAGQGQDSNVRSKNPRKRGKPSFFQDPSSPPNSRADRFPAVLIPYQDSKCDMVLDGTVPLLDGAEEFKEQGVMDLWQNSHLTTPSCSSLDSSSPESRKRRQQDRDEIRLPRDTENLRRSGRLCVQLKMFKHRDGVGAEATNPIFL

SEQ ID NO: 56242 - protein, 418 aa, Oryza sativa
MASWENLGDVATVVQLTGLDAVRLISMIVKAASTARLHKRNCRRFAQHLKLIGGLLEQLRVSELKKYPETREPLEQLEDALRRAYLLVHSCQDRSYLYLLAMGWNIVYQFRKAQNEIDNYLRLVPLITLVDNARVRERMEYIERDQCEYSFDDEDKEVQDALLNPDPSTNPTVVLKKTLSCSYPNLPFNEALRKESEKLQVELQRSQSNMDMGQCEVIQHLLGVTKTVASSIPEKCATPKVSEKADSNHTKVSEDSAKTYHDDSPKKQKDACTAPRSSPPSSYGHDLVSSRGSYSDEWHADLLGCCSEPSLCLRTFFFPCGTFSKIASIAKNRPMSSSEACNDIMAYSLILSCCCYTCCVRRKLRQKLNIAGGCIDDFLSHLMCCCCALVQEWREVEIRGAYGERTKISPPSFRYMEH

SEQ ID NO: 56243 - protein, 247 aa, Oryza sativa
MEMAPAAQVASNPRTVEDIFKDYSARRGALVRALTSDVDEFFGLCDPDKENLCLYGLANGSWEVALPAEEVPPELPEPALGINFARDGMNRRDWLSLVAVHSDSWLVSVAFFFAARLNGNERKRLFNMINDLPTVYEALVDRKHVRDRSGVDSSGKSKHSTKRTGEGQVKRSRVVAEEYEDDDEEHNETFCGTCGGLYNANEFWIGCDICERWFHGKCVRITPAKAEHIKHYKCPDCSSSSSKKTRL

SEQ ID NO: 56244 - protein, 84 aa, Oryza sativa
MEQHQELFPQSRMAQVMVAPSHLFGALLCLLVLVPKKCLLAHNHLKGRMLIDQLFQRVCKKAMTPNAMRLLARMELLRPILIHQ

SEQ ID NO: 56245 - protein, 429 aa, Oryza sativa
MANLFCLASLRRAVAAVAAAAAPCPESYKQGICGSTFHCRYFSSKAKKKTKSSGTDSGEENLSKKDLALHQAIDQITSAFGKGAIMWLGRSEGRREVPVVSTGSFSLDLALGTGGLPKGRVIEVYGPEASGKTTLALHVIAEAQKHGGYCAFVDAEHALDPALAESIGVNTSNLLLSQPDCGEQALSLVDTLIRSGSVDVVVVDSVAALVPKSELDGEMGDAHVALQARLMSQALRKLSHSLSLSQTILLFINQIRSKVTTFGGFGGPMEVTSGGNALKFYASVRMNIKRIGLVKKGEETIGSQVLVKIVKNKHAPPFKTAQFELEFGKGICRSSELIELGLKHKLVKKLGGAFYSFNEESYRGKDALKSYLNENESIAKELETNLRKLMGTQAPKKQEDEGDFLSDLPEESLATETSSEEELAAVIEA

SEQ ID NO: 56246 - protein, 604 aa, Oryza sativa
MAERLTRIAIVSEDKCKPKKCRQECKKSCPVVKTGKLCIEVTPASKLAFISEELCIGCGICVKKCPFDAIEIINLPKDLEKDTTHRYGPNTFKLHRLPVPRPGQVLGLVGTNGIGKSTALKVLAGKLKPNLGRFKNPPDWQEILTYFRGSELQNYFTRILEDNLKAIIKPQYVDHIPKAVQGNVGQVLDQKDERGVKAELCVDLELNQVIDRNVGDLSGGELQRFAIAVVAVQNAEIFMFDEPSSYLDVKQRLKAAQVVRSLLRPNSYVIVVEHGLSVLDYLSDFICCLYGKPGAYGVVTLPFSVREGINIFLAGFVPTENLRFRDESLTFKIAETQESAEEIETYQRYKYPTMSKTQGNFKLTVVEGEFTDSQIVVMLGENGTGKTTFIRMLAGLLKPDTVEGTEIEIPEFNVSYKPQKISPKFQHSVRHLLHQKIRDSYTHPQFVSDVMKPLQIEQLMDQEVINLSGGELQRVAICLCLGKPADIYLIDEPSAYLDSEQRIVASKVIKRFILHAKKTAFIVEHDFIMATYLADKVIVYEGRPSIDCTANAPQSLVSGMNKFLSHLDITFRRDPTNYRPRINKLDSTKDREQKSAGSYYYLDD

SEQ ID NO: 56247 - protein, 841 aa, Oryza sativa; identical to SEQ ID NO: 36519

SEQ ID NO: 56248 - protein, 421 aa, Oryza sativa
MVVDARDPLFYRCPDLEVYAKEIDEHKRTMILVNKADLLPMNIRKKWADYFKAHDILYVFWSAKAATATLEGKILSGYSEQDSASLDLDTKIYGRDELLKKLQTEAEFIVAQRRAAAIKEDSRATSSDSVSSVAKHVVVGFVGYPNVGKSSTINALVGEKKTGVTHTPGKTKHFQTLIISEELTLCDCPGLVFPSFSSSRHEMVSCGVLPIDRMTKHREAIQVVADRVPRSVLEQIYKITLPKPKPYESQSRPPTAAELLRAYCASRGHVSHAGLPDETRAARQILKDYIDGKIPHFELPPGMVDTENEHEETSGLEGPTTSAYNESGGSDSDERDDTVDPAQPDMRHVLSDLESFDLATEGSKPAGKKKKEASHKQHKKPQRKKDRSWRVGNDGGDGTAVLRVYQKPAVNLSAVSASDKT

SEQ ID NO: 56249 - protein, 29 aa, Oryza sativa
MPAVMMCTPRCSWELQSCLVSARSRSRAQ

SEQ ID NO: 56250 - protein, 543 aa, Oryza sativa
MARPPQEAIDTFVSITGADEALAVRKLEEHGGDLNTAINAHFNEGDSTVNRASQNNIPESHDDMMDLDGPLDNAFRRSLFPETLRDPFALMDTNFQQNYFDRVGSTDTFGHGPQVSHPREVREIPIEVKDSNPQTGPSGQAPIIEDVTGHESSYGPEVRGAIVIDDDDDEQPSAPSLHANIDSSLQPNPSIPTAPPLVHVTDYDNDIEEEMIRAAIEASKRDAEAMTITAEQGITQPPEGVNITEHSFDEEDKGTASGTAGRQGLATEKVGSSRQPIDEDTLQEETEDVEEQPLVRRRSRRIPSGNTESAQPVYTVDSPPSSSQPQGNLNDRQNNGDEFPSEWGGISSEEHDEAVMLEAAMFGGIPEGPMYPFSMPSHRSPSLYPHVEHAPSPALTEQRLLREQQDDEYLASLQADQEKELKALQEAELRRLEETAAREAALEKQKQEEEERRKKQLEEEELESSLASKQASLPSEPAADEEGAVTLVVRMPDGSRQGRRFLKSHKLQFLFDFLDIGRTYKPGTYRLVIRYCKVVPKACFHHW

SEQ ID NO: 56251 - protein, 632 aa, Oryza sativa
MASRAPCLLAARGIASSPHLARRLKQTENEIVQMFRTPSPRNEDAVAALSPRYTNSVRVLDERFIRILKIFKWGPDAERALEVLMLRVDHWLVREVMKTDVGVNVKMQFFRWAAKKRNYQHDTSTYMALIHCLELVEQYGEMWKMIQEMVRSPICVVTPMELSQVIRMLGNAKMIGKAITIFYQIKARKCQPTAQAYNSMIIMLIHEGQYEKVHELYNEMSNEGHCHPDTVTYSALISAFCKLGRQDSAIRLLNEMKENGMQPTAKIYTMIISLFFKLDNVHGALSLFEEMRYMYCRPDVFTYTELIRGLGKAGRIDEAYHFYHEMQREDCKPDTVVMNNMINFLGKAGRLDDGLKLFEEMGVSHCIPNVVTYNTIIKALFESKSRVSEVFSWFERMKGSGISPSPFTYSILIDGFCKTNRIEKAMMLLEEMDEKGFPPCPAAYCSLIDALGKAKRYDLACELFQELKENCGSSSARVYAVMIKHLGKAGRLDDAINLFDEMSKLGCTPNVYAYNALMSGLARACMLDEALTTMRKMQEHGCLPDINSYNIILNGLAKTGGPHRAMEMLTNMKNSTIKPDAVSYNTVLSALSHAGMFEEAAELMKEMNALGFEYDLITYSSILEAIGKVDQE

SEQ ID NO: 56252 - protein, 221 aa, Oryza sativa
MGSVVDAPTVVAGQEEVTDNMLGDKKVTVVFVLGGPGSGKGTQCANIVEHFGFIHLSAGDLLRAEIKSGSENGTMIENMIKEGKIVPSEVTIKLLQEAMIKSGNDKFLIDGFPRNEENRAAFENVTKITPAFVLFFDCSEEEMERRLLGRNQGRVDDNIETIRKRFKVFVNPVCLSLSTIMQRTRLKRLMLQNQFLRCLKMSKPFSLHMRQMPLRAIERTT

SEQ ID NO: 56253 - protein, 498 aa, Oryza sativa
MESSSARSNTSERNRVDYARSVSMDSAGHSLGARSASILSRRSSRQGSRGSISLSREMGDSILSSMRHSLQSADQLLGDVDGSVLAQVIDSGDRGLAFENDVDEEEENNVEDHQAVPLPDDTSMRIHGRSSQGTSVVAPVSAMKPKDTNVNGPASSSIKVEPYKLSWMQDYASYLIHLAVFGFLGVFTRYGLQKLFGPSCLALTSDQSPLYLDLPSNMLGSFLMGWFGIIFKADIRHISDHLIVGITTGYMGSLTTFSGWNQKMVGLSSKGHWVYAVAGIVLGMFIVNESITVGAETGERLRGWILKCIIEKNSIGSKCGWEDWRVDTRTKHYALLGVMVILMSLIWILSIVLAIVKVHSLGHGAVLWLGCSVAPPGVWLRWYLARLNGGGIGIGKRRHLKWLPVGTLAANVLAAAIMAALAVTAKAENTRRLTTVLNGIQLGFLGCLSTVSTFAAEVYTMRRSGQIARAFVYAAATFVLSFVLGTLIYSVPVWVEHY

SEQ ID NO: 56254 - protein, 59 aa, Oryza sativa
MIVTGSYAVALTRSWRRRMLLFLSPHYTVVSTTIRTTEITTDIMLLNASCTIRNRGCVP

SEQ ID NO: 56255 - protein, 356 aa, Oryza sativa
MMSLAVKSKTADTVKCEVVDGGELKSRRHLNVRGKSATLPSITEKDWEDIKFGVENGVDFYAVSFVKDAKVIHELKDYLKSANADIHVIPKIESADSIPNLQSIIAASDGAMVARGDLGAELPIEEVPLLQEEIVRTCRSMQKPVIVATNMLESMIDHPTPTRAEVSDIAIAVREGSDAIMLSGETAHGKFPLKAVKVMHTVAQRTESSLYNPTTSPSLVAHPQALLNEEFSQSQLSKMFGSHATMMANTLCTPIIVFTRTGSMAVLLSHYRPSSTIFAFTNEERVKQRLALYQGVVPIYMKFSDDAEETFSRAISSLLNAQFVKEGDYVTLVQSGVKSIWREESTHHIQVRKVQG

SEQ ID NO: 56256 - protein, 601 aa, Oryza sativa
MEKIQSDCPYPGCFFCVMKEANPSKRRASVLKFFRELPSQDDDGQVLPISGLWNTAMAHPNDPEFINLGIFECMSALIWKGLKNRRWLSHDQNIYIPYYAAHIIGSYTMNMEEFAERAVRAGVIPPLVELLRGRLTWVEQRVAVRALGHLATYPSTFPAVADHGEVLELAIQLASSSLEIVYSHFYQFVDRRIGYHCDLLTRGMGGVEMESRKAEEWASQLQCWSLQLINCFAFKSEFLHDICKADFLVKLPGMWGGLVNENSPAGVGLLRTICQSKLGRGHVANIPSVVEALCNIARSSDDWQYMAVDCLLWLVQDSNTCHKVIDRVASTLIDLANISMLGDYKKLGDTIVTVLQECMQQYANSRNSISTHTKEQIDELLSSKQSFKLEKNMPKEDLHIKQAAALVVKLEGNSLFSSGNIAGAAAKYSEALALCPMKSKKERVVLYSNRAQCYLLLQQPLAAISDATRALCLHSPLNRHAKSLWRRAQAYDMLGLAKESLLDAILFINECSQSNDPDLSLKQNKVPDYAERLVKKQMRTAWLFREAALKHGGIHCEGEASDAFGQEADDSEWETASESDAENDATGEADDETEWKNDNQV

SEQ ID NO: 56257 - protein, 104 aa, Oryza sativa
MARARWIGDGRRPAAALPLLGLCAFLCAVMLVVSLAPPPGEEEEEAKVRSSSLPAAATSVPAGGRRLLLPAARTRRFRPRRWNSAGIDDSKHEVPSGPNPDSNR

SEQ ID NO: 56258 - protein, 320 aa, Oryza sativa
MAATLSQLDDGIVRGMAIGAVFTDYAGKINCLDFHRKEDLLVTSSEDDSIRLYNITSATLLKTTYHRKHGADRVCFTHHPSSILCSSRYNLESAESLRYLSLYDNRCLRYFKGHKDRVVSLCMSPVNDSFMSGSLDHSVRIWDLRVNACQGILRLRGRPSVAYDQQGLVFAVAMEGGAIKLFDSRSYDKGPFDTFLVGGDTAEVSDIKFSNDGKSMLLTTTNNHIYVLDAYGGDKRCGFSLESSPNVATEAAFTPDGQYVISGSGDGTLHAWNINTIQEIACWNSHIGPITALKWAPRRAMFATASTALTFWIPNNSSSN

SEQ ID NO: 56259 - protein, 120 aa, Oryza sativa
MMTALKTVTAATAGGSMLVLSGLILAGTVIALTVATPVLVIFSPVLVPAAIALALMAAGFVTSGGLGVAALSVFSWMYKYLTGKHPPGADQLDHAKARLASKARDIKEAAQHRIDQAQAS

SEQ ID NO: 56260 - protein, 235 aa, Oryza sativa
MGILEFYNFPIPSLPSASSNYQPSSLPEGVQFVLNTLPVYDKCIGDGDGFTAYVSTTDPRESANVPLEVHELVIARTQARKCRDYQSADALLSSLDEAGYKIISCSDDEVLARKYRIRMRGIDAPELKMPYGRESRNALVKLIGGKSVKIYVYDLDQFGRYVGDIYCNNLFIQEQMLKNGHAWHFKTYDKRPEFARWEREAKAANRGLWASGNPEKPWDWRRDQRNARQDAIQVY

SEQ ID NO: 56261 - protein, 646 aa, Oryza sativa
MDKASCGLGFGDSINSLDTSRHWSTVQHTSGLKATTIDYSTYSSFSIASSKTLKRKRSAMAGPEGTGNPLLTLGLGHSPSSSDNSKVSSATAYAMSPSSLKEADEESSADLGLNFELCLGNDMVHCQKRSPVGAENSPLTNSHKLDLQLSLSTGSPESAVTNTNMVSPIIHGGLEIPVTNCSPAIIGEGSVPCTWVFEKSVISSSYASEATYTFPFSKVPKTGDAAMSSPVISSTLVTSMKSPVACTSGSINPQQRNSITKNCQFPGCVKGARGASGHCIAHGGGRRCQKPGCQKGAEGRTIYCKAHGGGRRCQFLGCTKSAEGRTDHCIAHGGGRRCSHDGCSRAARGKSGLCIRHGGGKRCQKENCIRSAEGHSGFCISHGGGRRCQFPECTKGAQGSTKFCKAHGGGKRCTFSGCNKGAEGSTLFCKGHGGGKRCLFQGGGVCPKSVHGGTQYCVAHGGGKRCAISGCTKSARGRTEYCVRHGGGKRCKFEGCAKSAQGSTDFCKAHGGGKRCSWGQVDLNFGVGAPQCDKFARSKTGLCSAHCALVQDHCVRGGTLGAATFQFATDAKFDEMEVTPVKGDPHAQASSDDQSHLGGAHPPAVPAITSDRFSEGRVHGGGLLALLSRGGNHANAGNSKNGALLP

SEQ ID NO: 56262 - protein, 475 aa, Oryza sativa
MREREAQLRRAVVAVVVGAARTPSAAQVHDELCSEFSLSPHSFSVRRFFPEDFLVTFQSDEIFDRVARRRSIPLGQFRLLVAPWSRQLHAREGSMLFRVRLHLEGIPGHAWDEATAAAVLGSSCRIISCDPVSSSASDMAVFKLYAWTSDPASIPKEKWLRIVEDGGPVVTPQGTCERYLDYVVLIHLTAMEDHISPPEPYLPFAPSSGDSGRPSSDDSDDGPPRRHFFHTSRGRRDGSPPPPQSGQGSTGGGGGGGHRAAPVAVMPAELCSGRLLRRAGALAPEKPVRAVAGAEAAMARRRRPRGRRRQQKVLKWKSKFLKLSPVRSCCRWQPRKGQDTSEPVSVAKAKESSALQSLSLGSVVGQEDREFVLPVSAASEADSAVSSRRDMVCQSPLPPDASWECCWRTDWRTDCPVPEAHDPMLEEASRRPRLGWPPLQLGWRPNKAVWCYRLSLGRLLSQLGLGLRCSHSPAR

SEQ ID NO: 56263 - protein, 187 aa, Oryza sativa
MYCYTSSDIVKEFKKHDKKPDKYIKHWSAIKPKTGVPYTIDIGYERFLGPEIFFHPEIYSADFSTPLPELIDSCVQSAPIDTRRDLYKNIVLSGGSTMFKDFHKRLQNDIKKIVDERVAATNARHHVEVKPVEVNVVAHPIQSYAAWFGGSVAASNPEFYESCHTKEEYEEHGASICRTSTVFKGMY

SEQ ID NO: 56264 - protein, 719 aa, Oryza sativa; identical to SEQ ID NO: 43712

SEQ ID NO: 56265 - protein, 194 aa, Oryza sativa
MLCEQVVRMANSLVDESGEPLKSAAAVCGPKGWPTVRPDILVATPAALLNYLFDYDPEKRRRERFLRNVKFIVFDEADMLLCGSFENQVIRLIHMLRFDEKLLSRMEDSGKEISLGDTNEYREDSDSQSAELSADDEENEDGLVQHRPVNVENAHIGAHKKDWRRVKKFIDAASSMSLLLPPFRKVAKRLPVVC

SEQ ID NO: 56266 - protein, 261 aa, Oryza sativa; identical to SEQ ID NO: 37621

SEQ ID NO: 56267 - protein, 243 aa, Oryza sativa
MAGYRSRSRSYSPQPRRRYSRSPPRYKRYDDPRDRYPRGGGGGGGGGEGPRRGYGRPPAPTGLLVRNISLTARPEDIRIPFEQFGPVKDVYLPRNFHTRELRGFGFVKFRYPEDAAVAKQELNHQVIGGREISIVFAEENRKTPQEMRMRTRTSGRYMDGSHRRRSVSRSPRSRYHSYSPSPSPARRDYRDHRDDYSPGESLSPHGQDKRHHRSNGRSASPDELERHVSPSNNGHGPPVDGKS

SEQ ID NO: 56268 - protein, 548 aa, Oryza sativa; identical to SEQ ID NO: 40979

SEQ ID NO: 56269 - protein, 228 aa, Oryza sativa
MSRIHPSYQRQDAAAAAASTAAPRAAVYTVWKRSSMGFQGTDGFSVYDDAGSLAFRVDNYSRRRKLFSGDLLLMDGHGSPLLALTPQIISMHDQWNCYRASEEGQGKRARSQQLFSMRKCSVMQSSHEAEVHMSGCTHASSDRTGHVPAFSIEGSFKRRSCKIRNSGGEEVARITRKKAGAASLSLTLAEDVFSLEVQPNVDCAMIMAFVIVLDRICWKPYTPMICSS

SEQ ID NO: 56270 - protein, 416 aa, Oryza sativa
MGDWVIGALINIVGSVAINFGTNLLKLGHDQREKLSTTNNNQGNDKFVQKSVMHFQTWRIGILFFAAGNCLNFMSFAYAAQSLLAALGSIQFVSNIAFAYFVLNKTISVKVMVATTFIVFGNIFLVSFGNHQSPVYTPEQLVAKYSNLVFVLYCMSLVFVVAFNQYLYRSGETIISDSAKHTGSHWRTLLPFSYAIVSGAIGSCSVLFAKSLSNMLRLTMSSRYQFHSWFTYSMLLLFLFTAGFWMARLNEGLSLFDAILIVPMFQIAWTFFSICTGFVYFQEYQVFDTLRIVMFVLGMTSVFIGISLLAPDDSKDGSSATQEPAIDANRPGKMQTEETEVDGTNSFTSSVKVKAKRILSKAKSACSMSLGLGEETISASSVLAMPMVSSRTTGFRGIATDRSKYIPLRSTDWDNL

SEQ ID NO: 56271 - protein, 371 aa, Oryza sativa
MDLSNSSPVITDPVAISQQLLGGLPSNLMQFSVMPGGYSSSGMNVGVSRLKIEEVLVNGLLDAMKSSSPRRRLNVAFGEDNSSEEEDPAYSAWMAKCPSALASFKQIVASAQGKKIAVFLDYDGTLSPIVDDPDKAVMSPVMRAAVRNVAKYFPTAIVSGRSRNKVFEFVKLKELYYAGSHGMDIMAPSANHEHSAEKSKQANLFQPAHDFLPMIDEVTKSLLQVVSGIEGATVENNKFCVSVHYRNVAEKDWKLVARLVNEVLEAFPRLKVTNGRMVLEVRPVIDWDKGKAVEFLLQSLGLNDSENVIPIYIGDDRTDEDAFKVLRQRNCGYGILVSQVPKETEAFYSLRDPSEVMEFLNFLVRWKKHSV

SEQ ID NO: 56272 - protein, 343 aa, Oryza sativa
MAAALSKLLRRRLRGGGHRLLPSRPSTSAASQPPPPPPSAATPPPPGAGKEAGAWSKLFLFAPGAITFGLGSWQLFRRQEKIEMLDYRTRRLEMEPIAWNQMAPSDLSAGVDPATPEFRRIVCEGDFDEERSVFVGPRSRSISGVTENGYYVVTPLIPRPSEHGSSWPPILVNRGWVPRDWRDKNVQDHQGVREVPEYKEADKKTDGKGSWWKFWSNSKEPEQSCEIEKPVKPPVRVLGVIRGSEKPSIFVPANEPSVGQWFYVDVPMIARACGLPENTIYIEDINEDVSPTNPYPVPKDVSTLIHHSVMPHDHLKYTVTWYTLSAAVTFMAAKRIKAKKVKL

SEQ ID NO: 56273 - protein, 682 aa, Oryza sativa
MTMQTRVFIVHMLPARASRLFARAKALGMMTKGYVWIVTDSIGIVLDVLPQHSIESMEGIVGFRPYIAESTRITDFSSRFTTLFRTKYHPNTDIRMAKPTIFQLWAYDVAWAVATATEKVHRTRSLNPTFHPPGNIGKNLVDDLPALPAGPELLNSILQGEFDGLAGQFRLIDRHLQVPTYEIVNVIGEKTRVIGFYSPDSGLTMSVNSRIIHGDAKFSTSSSDLENIVWPGDSTTVPKGWDFPVNAKILQIGVPVRRDFKTFVNVETNPNTNRSTVSGYSIDMFEAAVKKLPYALRYEYIPYDCAVSYDLLVSQVFYKKFDAAVGDVTIIANRTRYVDFTMPYTESGVSMLVLSKSDDEPTTWIFLQPLAKDLWIATMIFIFFTGLVVWVIERPINRDFQGSKWKQCITAFYFAFSTLTFSHGQKIQSIQSKIVVVIWCLVLMILVQSYTASLSSMLTAERLQPSVTDLKQLLANGDSVGHQSGSFVQSILKKLKFDDHKIKVYSTQEEYAKALRMGSKHGGVSAIFDEIPYLNSFCSKYGREFQMVGPIDRTSGFGFVLPKGSPLVPDLSEAILSLTEEPEGLKIEKTWFMDSSLDYYGSHSKGSSRISFQSFQGLFIIVGCLLGAVLLINFSKFLYDKCKEMRGFGSDRVHSGERVVCYGEAQPQPPQIVMVDRRSCAC

SEQ ID NO: 56274 - protein, 377 aa, Oryza sativa
MALDYESLLKKADDSQGAFEDKHATAKLLKEEEEDGLRDLVRHTMFEKGQSKRIWGELYKVIDSSDVVVQVLDARDPMGTRCYHLEKHLKENAKHKHLVFLLNKCDLVPAWATKGWLRTLSKDYPTLAFHASINSSFGKGSLLSVLRQFARLKSDKQAISVGFVGYPNVGKSSVINTLRSKSVCKVAPIPGETKVWQYITLTKRIFLIDCPGVVYQNNDSETDIVLKGVVRVTNLADASEHIGEVLRRVKKEHLKRAYKIEDWVDDNDFLVQLSKTTGKLLRGGEPDLTTTAKMVLHDWQRGKIPFFVPPPQQGEDSPSETAEPVEKSDEEGVSSDRTAAAMKAIAGIISSQQQMNVPCQKEFGVTNEDSEVAEQSE

SEQ ID NO: 56275 - protein, 207 aa, Oryza sativa
METSSRSSSGCQSGWTLYLDHSNGGHRQYYARKNHELDDDDDDDDMVSDASSGPPPRMRDEDDDEVWHQHRHQQQRRQRNHLVGCRTGHDDDDDGDDDSGSSGVGGGYSTCTARSMSSKRRAIAGEHSVVDAAVVVVLRHREHNCGGGDDDLDDTASSSSAVSSSLQPSCAFSARHLQQWSSTAAVRGTSIYCRPPAPATQCYIATD

SEQ ID NO: 56276 - protein, 318 aa, Oryza sativa
MSVIDILTRVDSICKKYDKYDVERLNGANVAGEDPFARLYGSIDADINECVEKAEAAKQEKNRATVVALNAEIRRTKAKLVEEDLPKLQRLALKKVKGLTKEELATRSDLVAALPDRIQSIPDGSSSAKKNGTWGASGSRTGGAIKFDTSDGNFDDEYFKGTEESNQFRREYEMRKMKQDEGLDIIGEGLETLKNMASDMNEELDRQVPLMDEMDEKVDRANTDLKNTNVRLKETVLQLRSSRNFCIDIVLLCVILGIAAYLYNVLKKVRPDCAMDLFSTSSGDGWMSFDVSTSCSLYFYLICVIVVWCSSGTCEHPC

SEQ ID NO: 56277 - protein, 410 aa, Oryza sativa; identical to SEQ ID NO: 54690

SEQ ID NO: 56278 - protein, 480 aa, Oryza sativa
MEGFCFARCRFTRLVVAMQLVMGVLVICISMASLHRFYTTDALLPGGLDDPARCARFHGAVAGGYSGFDIRALADRVDEVLVQLAELQDKLEATALKIGKKTKKRKGKGKLQQQENMTMTEFQRFLEDEVIHPLYGAHIVLRLIRIPRPDPDGGAPAVDPLVNFFAAEETRKYVTAKRNREGRPGAYGANRTYGSIGHACVVMRRELDEYMSYDVGALCPDDWDLGQRLMLGGCDPLPRRRCLARASKLFRRPLPINESLWALPDDGNVRWSRYHCRGYRCLSARNPRRGYDRCVGCFDMDREKQRWMQGSNGTTLADFRMEEVLAVKPGEIRVGLDVTVGTGSFAARMRERGVTVVTTAVNLGAPFAETVALRGLVALYAGLGQRLPLFDNSMDMVHTGGVLDGWVDLQMLDFVLFDWDRVLRPGGLLWVDKFACARKDLDDYMYMFLQFRYKKHRWVVSFKSRDEVYLSALLEKPLRS

SEQ ID NO: 56279 - protein, 249 aa, Oryza sativa
MAGSSESDYYSEEEEELGWEEDGLGSEGEEEDAEAARERALKRLDGLGKRGVCYLSRVPPNMNPSHVRQMLSKYGEVQRIYLVPEGQGHRKHTNVRAKAYTEGWIEFSKKSVAKRVANLLNGEQIGGKKRSPFYYDIWNIKYLKKFKWDDLVGEIAEKTHIREQKLNLEIAAAKKQRDHYLSNVEKSRTLKHIQERRKKKQKTEGAEFNEVREEKIARTIPQKKPVEETDAKTKPKLPKDILAGVFGGP

SEQ ID NO: 56280 - protein, 340 aa, Oryza sativa
MRRSSQGKSSSGGGVGGVRRYDVHGGGNLLACYAKAARPRPSKWDDAQKWLSRAGDDDCGGEATRRRSSCASADDGLLLPPPPAARKGAGGWRSWSNVEWEGAPAAMAPALKAARGDEGVDTKVVDAVQAYVPQRCVVSLRDVGTEMTPGGSKEPSRANTPRVVAPAATARVVARGTASPGQCDGGSRDSAVAGGVVDLRAARKRADQGHDEVAGTITAVSPATAWGDAERAKYMARYRREEMRIQAWENRERRKAELQMRTAEEKAERMRLRAQARTAGKLATAQAEAKARRARAEAELALGRPGGGAKGWLLTRSASWSSGSGRSPSSLSLRLPLLCR

SEQ ID NO: 56281 - protein, 891 aa, Oryza sativa
MRQTRSLAAAAAVLVVGVVLHWVGVVDAATAAERGILLEFKAAVTDPNGALASWTAGGDPCVDFAGVTCDPSSRAVQRLRVHGAGIAGKLTPSLARLASLESVSLFGNGLSGGIPSSFSALGPTLHKLNLSRNALSGEIPPFLGAFPWLRLLDLSYNAFSGEIPASLFDPCLRLRYVSLAHNALTGPVPTAITNCSRLAGFDFSYNRLSGELPDQLCAPPEISYISVRSNSLSGAIAGKLNACRSIDLLDVGSNHFAGPAPFGLLGLVNITYFNVSSNAFDGEIPNIATCGTKFSYFDASGNRLTGPVPESVANCRSLRVLDLGTNALAGDIPPSIGKLRSLSVLRLAGNAGIAGSIPAELGGIEMLVTLDLAGLALIGDIPVSLSQCQFLLELNLSGNQLQGVIPDTLNNLTYLKLLDLHRNHLVGGIPVTLAQLTNLDLLDLSENQLTGPIPSELGNLSNLTHFNVSYNGLSGMIPALPVLQSFGSSAFMGNPLLCGPPLNNLCGASRRAKQLAVSVIIVIVAAALILIGVCIVCAMNIKAYMRRSKEEQEGKEEDEVLESESTPMLASPGRQGSNAIIGKLVLFSKSLPSRYEDWEAGTKALLDKDCLVGGGSVGTVYKATFENGLSIAVKKLETLGRVRSQDEFEQEMGQLGNLSHPNLVAFQGYYWSSSTQLILSEFMVNGSLYDHLHGSPHTFSGSSSRVGLSWEQRFEVALGTARALAYLHHDCRPQVLHLNIKSSNIMLDKDFEAKLSDYGFGKLLPILGSYELSRLHAAIGYIAPELASPSLRYSDKSDVFSFGVVLLEIVTGRKPVESPGVATAVVLRDYVRAILEDGTVSDCFDRSMKGFVEAELVQVLKLGLVCTSNTPSARPNMAEVVQYLESVRTNS

SEQ ID NO: 56282 - protein, 304 aa, Oryza sativa
MVWFQCEDCGDDLKKPKLAGHFRSCSAYRLSCIDCGEFFTQETVQGHTQCISEAEKYGPKGQNKASNNAQGKQDKPKPNADVDINVGLSTYPPWFCSLCKTTTTSKQTLLSHADGKKHRAKAKAYHASQKQANGVEQTPKETVGAPVTESAQVNNERSTENERGVDNDAAKRKRANDTTSEEPDNTKRQNNLSVNSGEVVQSSNEEAETKAKSKGTKDELVSSANLKGSKKQKIKWKKIITKVLQTNPDGVLKLKKLQKLVTKELLECGLTEDKEQMHAILMDKISSSSRFSVDGKRIRLVAKD

SEQ ID NO: 56283 - protein, 636 aa, Oryza sativa
MPARRGRGKRKQQQPPPPPTGPADARQPEGKQREEERKGMEGSDKGGAGDDGSPAPLPETVQIGNSPTYKLERKLGKGGFGQVYVGRRISSPTHGNRNSGANALEVALKFEHRTSKGCSYGAPYEWQVYNTLSGNHGVPRVHYKGKQGGFYIMVMDMLGPSLWDVWNNNSHSMSVEMVACIGIEAISILEKMHAKGYVHGDVKPENFLLGPPDTPEGKKLFLVDLGLATKWKDAGTGKHVEYDQRPDIFRGTVRYASVHAHLGRTGCRRDDLESLAYTLIFLLRGRLPWQGFQGENKGFLVCKKKMATSPESLCGIGPPPFRQFVEYVVNLKFDEEPNYAKCIALFDGIVGPNPDGRPLNTDGAQKLVYQVGQKRGRLTAAEDEEQPKKKIRMGMPATQWISVYNARRPMKQRYHYNVADDRLAPHIQKGNEDGLFISSVSSCSDLWALIMDAGTGFTAQVHELSHYFLHKEWIMEQWERNYYITSLAGSNNGSSVVIMSTGTPYAQQSYKVSDSFPFKWINKKWKEGFYVTALATAGSRWAVVMSRNAGFTHQVVELDFLYPSEGIHQRWDSGYRITATAATCDQVALILSIPRRKPNDETQETLRTSAFPGQHVKEKWAKNLYLGSICYGRSVS

SEQ ID NO: 56284 - protein, 540 aa, Oryza sativa
MGRRGAGAGAAVVVVAAFVAAAVASGDTLADLGGAAKGIDSVPEVNNLGPWAKGLLKGMPDSAAGPAEGPIAKYPLVLAEERTRRPDVLDHLRMYGGGWNITNKHYWASVSFTGIAGFVLAAGWFISFGIAVAASCFWKSRIDKENDFHADILRLVLLVVFIFTLTAGSVILFCGQSKFGQEATSTVDFVVNQSDFTIQTLRNVTDYLSLAKTISVAALYLPSDVQGQIDNLKVDLNKAADTISQKTSENYRRIRKVLHNLSVALICIAALMPVLAFLGYVLELYGQRSTVYVFVTLCWTVVATLFILLGIFLILNSAAKDTCEAMDEWAQHPQAETALSNILPRVDESTTNQTLYQSKHVVVILVGIVNRAISALSNRRPHHKHPGQFMPYLCSPYDANLTDRQCKSREVTFDNATTAWLNYTCTVPDSDLCSGSRTITPEIYSQLVLAANVSYALYHYAPLMLNLQDCKFVRNTFSSIASQYCPPIWRDLSLVSAGLALIASGLTLGLLLMLFADRPQREEVSELPSGSRITPVDCSP

SEQ ID NO: 56285 - protein, 267 aa, Oryza sativa
MNATDVPDRTQFNRDDFPVQYDDAKFFVIKSYSEDDIHKSIKYNVWASTTNGNKKLDAAYQEAQAKSSKCPIFLFFSVNTSGQFVGVAEMTGAVDFEKTLEYWQQDKWNGSLSLKWHIVKDVPNNILKHIILENNENKPVTNSRDTQEVNLDQGIQMLKIFKEHVSKTSILDDFAFYENRQKLMQEKRVKQQQIQKQVWDSRAPSSVTGEKQQDAATAKPKLPNGVNGELKVPAENGTAPVVTYAAKVAQTAATEKPALANGTVKAS

SEQ ID NO: 56286 - protein, 218 aa, Oryza sativa
MADEESSDFTFCKIDFEGDGGLEFPKAIPVASTPGDAGADNLKTKKIEGNMQANNSIKDQTSNSISSSINRVSLEDSNGKESVLSRENTQSNLSSQRKSSKKPAARAKVPFEKGYSQMDWLKLTRTHPDLAGLKGQLNRRLISLEEVKQHKTGDSIWTVLKGRVYNIAPYMKFHPGGVDMLMKAAGKDSTALFNKYHAWVNFEFLLEKCLVGFLDPNE

SEQ ID NO: 56287 - protein, 707 aa, Oryza sativa
MPELRGGVWRARLRSKKVYDVQDADPAASPVSPAPRGRTGRRGGAAAGRGNKTVAEGGGRKALKPRGKGCRAVDLCKDQPCKDLPEVIARKAVTGKAQEDLGLNKVADRAANLMMDGESGDKFAAAEDESTTTPVPERVQVGNSPEYITDRKLGKGGFGQVYVGRRVSGGGSRTGPDAQEVALKFEHRSSKGCNYGPPYEWQVYHTLNGCYGIPSVHYKGRLGDYYILVMDMLGPSLWDVWNSVGQAMSAHMVACIAVEAISILEKLHSKGFVHGDVKPENFLLGHPGSVDEKKLFLIDLGLASRWKEASSGQHVDYDQRPDVFRGTIRYASVHAHLGRTGSRRDDLESLAYTLIFLIRGRLPWQGYQGDNKSFLVCKKKMATSPELLCCFCPAPFKHFLEMVTSMKFDEEPNYPKLISLFDGLIEGPASRPIRIDGALKVGQKRGRMVVNLDDDEQPKKKVRLGSPATQWISVYNARRPMKQRYHYNVADSRLHQHIEKGNEDGLYISCVSSSANFWALIMDAGTGFCSQVYELSQVFLHKDWIMEQWEKNYYITAIAGATNGSSLVVMSKGTPYTQQSYKVSESFPYKWINKKWKEGFHVTSMATAGNRWGVVMSRNAGYSHQVVELDFLYPSEGIHRRWETGYRITSTAATPDQAAFILSIPKRKPMDETQETLRTSSFPSNHVKEKWSKNLYIASICYGRTVC

SEQ ID NO: 56288 - protein, 210 aa, Oryza sativa; identical to SEQ ID NO: 30477

SEQ ID NO: 56289 - protein, 308 aa, Oryza sativa
MAGYPPNPGSGYPYGGAGGYGAPPPPYGSSPAPSAPPYGEKPPKEGKTSSSSAPYYGGGGGYGAPPSTQPYGSGGGYGAPPSTQRPQSYGGGYGAPPSSQPYGAPYGAPPPSSAPYGAPGGYGSPFASLVPSAFPPGTDPNVVACFQAADRDGSGMIDDKELQSALSGYSQSFSLRTVHLLMYLFTNTNVRKIGPKEFTSVFYSLQNWRSIFERFDRDQSGKIDATELRDALLSLGYSVSPTVLDLLVSKFDKTGGKNKAIEYDNFIECCLTVKGLTEKFKEKDTAFSGSATFTYEAFMLTVLPFLIA

SEQ ID NO: 56290 - protein, 591 aa, Oryza sativa
MVKKSKKSKSKRVTLRQKHKVLRKVKEHHRKKRKEAKKEGKSHRKKVEKDPGIPNEWPFKEQELKALEARRAQALQELELKKEARKERARKRKLGLLEDEDIANLASAASAQGSEFAEKDAAKENASLDVVKSQDHSERAFYKELVKVIEASDVILEVLDARDPLGTRCIDMEKMVRKADPSKRIVLLLNKIDLVPKESVEKWLTYLREEMPTVAFKCNTQEQRTKLGWKSSKIDKSSNIPQSSDCLGAENLIKLLKNYSRSHELKLAITVGIVGLPNVGKSSLINSLKRSRVVNVGSTPGVTRSMQEVQLDKKVKLLDCPGVVMLKSSNSGVSVALRNCKRVEKMEDPISPVKEILDLCPHEKLLSLYRVPTFTSVDDFLQKVATLRGKLKKGGIVDVEAAARIVLHDWNEGKIPYFTVPPKRDAVDDSDAVIISETGKEFNIDEIYKAESSYIGGLKSLEEFRHIEIPSNAPPQIDEEMLEDGKKQNEPAQENHDESMSDANEREGAKTASASIQNDKLYTAEGILDPRKRKAEKKRRKANKFSVLTDMDADYDFKVDYQMKDALAEEGNDGGDEEPKEADPMTGVDDA

SEQ ID NO: 56291 - protein, 416 aa, Oryza sativa
MMEMVLPVANATAAALARVSAVFNAPLARAVVFGIHIDGHLVVEGLLIAAILFQLSRKSYKPPKKPLTEREVDELCDDWQPEPLCPPIKEGARIDTPTLESAAGPHTTVDGKEVVNFASANYLGLIGNEKIIDSCVGSVEKYGVGSCGPRSFYGTIDVHLDCESKIANFLGTQDSILYSYGISTIFSVIPAFCKKGDIIVADEGVHWAVQNGLQLSRSTVVYFKHNDMASLASILEKLTHGNKHTEKIRRYIVVEAIYQNSGQIAPLDEIVRLKEKYRFRVILEESHSFGVLGKSGRGLAEHYGVPVEKIDIITAGMGNALATDGGFCTGSVRVVDHQRLSSSGYVFSASLPPYLASAAMSAVNHLEENPSVLANLRSNIALLHKELSDIPGLEIASNILSPIVFLKLKTPTGSAC

SEQ ID NO: 56292 - protein, 399 aa, Oryza sativa; identical to SEQ ID NO: 53121

SEQ ID NO: 56293 - protein, 437 aa, Oryza sativa
MGKHHVTLCCVVFAVLCLASSLAQAQVLFQGFNWESWRKQGGWYNFLHEKVEEIASTGATHVWLPPPSHSVSPQGYMPGRLYDLDASKYGTEAELKSLIEAFHDKNVECLADIVINHRCADYKDSRGVYCVFEGGTPDGRLDWGPDMICSDDTQYSNGRGHRDTGAGFGAAPDIDHLNPRVQRELTDWLNWLRTDLGFDGWRLDFAKGYSAPLARIYVDNTNPTFVVGEIWSSLIYNGDGKPSTNQDADRQELVNWVEGVGKPATAFDFTTKGILQAAVQGELWRLHDGNGKAPGLMGWMPDQAVTFVDNHDTGSTQSLWPFPSDKVMQGYAYILTHPGIPCIFYDHVFDWNLQHEIATLAEIRSRNGIHAESTLDILKAEGDIYVAMIDGKVITKLGPRYDAGGIIPSDFHVVAHGNDYCVWEKEGLRVPAGRKHY

SEQ ID NO: 56294 - protein, 272 aa, Oryza sativa; identical to SEQ ID NO: 38082

SEQ ID NO: 56295 - protein, 486 aa, Oryza sativa
MPPPSPPLRTLATRPPPTSSLSASYSRVLRFSVRDPWRRRRGQRLPLHALRSQRPEPAPASASHHDVVVVGAGIIGLSIARHLLLHTPLSVAVADAAVPCTGATGAGQGYLWMSHRTPGSDTWELAVRSKQLWEELAAEVDGLGGGGARERLGWMRTGSLLVGRTSEEMATLEERTKALSQAGIRAGCLSAASLHALEPELYVGHDGGAMFLPEDCQIDAFQAVSLIEKTNGSYSSEGRYMEIYNDPAMSLVRSETTGTVQGVQTSKHILYGRKAIVIASGAWTRTLLRSFLEPNPTLDIPVMPRKGHLLVLDKFDKLKLNHGLMELGYVGHQVAKSSGTPLSSESSEDEHGALSISMTATMNTKGNLILGSSREFKGFSREVDMSILKCIWDRAAEFFPTLKNVHLDIDENTEIRIGHRPFMPDGKPVIGSVPDLPNVLIATGHEGSGLALALGTAEMVTDMILGNPGKVDFSPFSIKDRFSAYD

SEQ ID NO: 56296 - protein, 148 aa, Oryza sativa
MATATAPRLCFPKPGAAIAPATKSPSFIGYAKQTLNMSGLRISNKFRVSATAVHKVKLIGPDGVEHEFEAPEDTYILEAAETAGVELPFSCRAGSCSTCAGKMSSGEVDQSEGSFLDENQMGEGYVLTCISYPKADCVIHTHKEEELY

SEQ ID NO: 56297 - protein, 324 aa, Oryza sativa
MGECGGGEYRCWEELLPDALGLVFRNLPLREVLTVVPRVCKSWSRVVAGPYCWQEIDIEEWRQQQGKPEQLVRMVEMLVARSCGSCRRISVSGLPGDPLFSFIGDHARALRTLEIPRSEISDAAVESVAPRLPNVTFLDISSCTKIGARALEAFGKNCKSLVGLRRVMHPTDVAGKACQRDEARAIACTMPRLRHLEMGYMVIATDAVLDILARCRELRFLDLRGCWAVDDKFLQERHPGLRVLGPGVDDCFENSYLEECSDYSDDSSIYSWELMEDDDDDYYAVGSDDEAIWDDGQGLENLEVRFYGGGFSESYAGFDWPPSP

SEQ ID NO: 56298 - protein, 555 aa, Oryza sativa
MATTATLPFSCSSTLQTLTRTIPLRLRLHRRRFLHHLPSLAALPRLPLPRPPLLPHARRHVSASAAPNGASSEGEYDYDLFTIGAGSGGVRASRFASTLYGARAAVCEMPFATVASDDLGGVGGTCVLRGCVPKKLLVYGSKYSHEFEESHGFGWVYETDPKHDWNTLIANKNTELQRLVGIYKNILNNSGVTLIEGRGKIVDPHTVSVDGKLYTARNILIAVGGRPSMPNIPGIEHVIDSDAALDLPSKPEKIAIVGGGYIALEFAGIFNGLKSEVHVFIRQKKVLRGFDEEVRDFIAEQMSLRGITFHTEQSPQAITKSNDGLLSLKTNKETIGGFSHVMFATGRKPNTKNLGLEEVGVKLDKNGAIMVDEYSRTSVDSIWAVGDVTDRVNLTPVALMEGGAFAKTVFGDEPTKPDYRAVPSAVFSQPPIGQVGLTEEQAIEEYGDVDIYTANFRPLRATLSGLPDRIFMKLIVCATTNKVVGVHMCGEDAPEIIQGVAIAVKAGLTKQDFDATIGIHPTSAEEFVTMRNATRKVRRSTTDEVESKDKVVTQN

SEQ ID NO: 56299 - protein, 177 aa, Oryza sativa; identical to SEQ ID NO: 51964

SEQ ID NO: 56300 - protein, 127 aa, Oryza sativa
MAAAARFLAVLLLVLAVAAASSAAASLAGGGDRHLQLGMLSTGGECRGTVGECLEGGDVDGEEGELGSASGEAHRRVLAGRGYISYQSLRRDSVPCSRRGASYYNCRPGASANPYHRGCSRITRCRG

SEQ ID NO: 56301 - protein, 509 aa, Oryza sativa; identical to SEQ ID NO: 33141

SEQ ID NO: 56302 - protein, 457 aa, Oryza sativa
MGKASKKSVAVAVAPAAVPAKGKGGKKREAEDEIEKAVSAKKQKAAAAPPAKAVPAPKADAKKAKKQPPPKKAASSSSGSSSEEDSSESEEEVKVQVKKTTKPVKQESSSDESSDESSDDEDAKPADPVANNGLKKGKPASSDSESDSDDEMDEDEKPAAPVKKTSVTAQKKKDDSDSSESESDESDSDEDVPTKSKAPAVAAKNDDSTDGSESESDSEDEDAAPKGAAKKESSSDEEDDSSEESSDDEPKQPQQKKAQEESSEESSEEDSDEEDEKLAKTPKKKTPAATKSQNDEPKTPASNQSQGTESATLFMGNLSFNLNQDQVKEFFQEVGEVISVRLATHEDGSSRGFGHVQFASSEEAKKALELHGCDLDGRPVRLDLAHERGAYTPHSRNDTGSFQKQNRGSSQSILSRVLIHLLRRARSENLLKDILLIAERSHESQFPWIVKLVQAKG

SEQ ID NO: 56303 - protein, 79 aa, Oryza sativa
MDSGAAATSEAKIRSRWRRRAVSSSSSSAMVSLTSLAYAPSLSWILACISHPHPTQPSFIYPIPPAPFFFFFFVVVTLL

SEQ ID NO: 56304 - protein, 118 aa, Oryza sativa
MVQRLTYRKRHSYATKSNQTRVVKTPGGRLVYQYTKKRASGPKCPVTGKKIQGIPHLRPAEYKRSRLSRNRRTVNRPYGGVLSGTAVRERIIRAFLVEEQKIVKKVLKIQKTKDKSAK

SEQ ID NO: 56305 - protein, 246 aa, Oryza sativa; identical to SEQ ID NO: 30336

SEQ ID NO: 56306 - protein, 645 aa, Oryza sativa
MSGDAIRRLLLAGVAPSNRPPPLTVKLLHARLLRLDLLAALSPLLLRALSSSALHLHALRLHCLLPNPSHLTFPIALKSASRLPHPLRAGEQLHARSLKLPSHTNPHVLTSLLTLYARCGLLHRAQRVFDEMPHPSTVSWTALITAYMDAGDLREAVHVARNAFANGMRPDSFTAVRVLTACARVADLATGETVWRAAEQEGIAQSVFVATAAVDLYVKCGEMAKAREVFDKMRDKDAVAWGAMVGGYASNGHPREALDLFLAMQAEGVRPDCYAVAGALSACTRLGALDLGRQAIRMVDWDGFLDNPVLGTALIDMYAKCGSTAEAWVVFQQMRKKDIIVWNAMILGLGMTGHEKTAFTLIGQMEKSGVKLNDNTFIGLLCSCTHTGLIQDGRRYFHNMTKLYHISPRIEHYGCIVDLLSRAGLLQEAHQLIDDMPMPANAVILGALLGGCKIHRNAELAEHVLTQLIRLEPWNSGNYVMLSNIYSNRGRWEDAAKLRLDMKEKGVEKVPACSWVEFEGKVHEFRVGDKSHPLSDQIYKKLDELGLEMKTMGYEPTTEVVMFDVEDEEKEHTLVHHSEKLAIAFNLLVTGPGETIRVTKNLRVCSDCHTAIKLISRITHREIIVRDNNRFHCFRDGSCSCNDYW

SEQ ID NO: 56307 - protein, 255 aa, Oryza sativa
MQRLQKQLLPALRAAFPLPASHFSSRLLSASTATLSPTRFVDEDALVAACGLTGAEALKASKRLQKVPSNLDAALTFLAFLADFRLSKDDIAAASSRYPRFLHLKVDETLTSQVARLRDIGLSTPEIGRLITIAPCILSNPRTISRLEFYLSFLGSYPRVHSALRNNSSLLRRNNIESEVKPNIAFLEQCGLTTCDIAKILMSGSRILIMQPEHVKEIVACADKFGMPRESAGFRYALMAVTGISPVRVSANLIS

SEQ ID NO: 56308 - protein, 779 aa, Oryza sativa
MLLDERRSLSPPPPQQRAPRFDLSPYLVLMLVVTVISFSLAIWQWMKATVLQEKIRSCCSVSTVDCKTTTEAFKINGQHGSDFINSADWNLASCSRMLVFAIPVFLVKYIDQLRRRNTDSIRLRSTEEEVPLKKRIAYKVDVFFSGHPYAKLLALLLATIILIASGGIALYVVSGSGFLEALWLSWTFVADSGNHADQVGLGPRIVSVSISSGGMLVFATMLGLVSDAISEKVDSWRKGKSEVIEVNHILILGWSDKLGSLLKQLAIANKSIGGGVVVVLAERDKEEMEMDIGKLEFDFMGTSVICRSGSPLILADLKKVSVSKARAIIVLASDENADQSDARALRVVLSLTGVKEGLRGHVVVEMSDLDNEPLVKLVGGELIETVVAHDVIGRLMIQCALQPGLAQIWEDILGFENAEFYIKRWPELDGMRFGDVLISFPDAVPCGVKIASKAGKILMNPDNDYVLQEGDEVLVIAEDDDTYVPASLPQVRKGFLPNIPTPPKYPEKILFCGWRRDIHDMIMVLEAFLAPGSELWMFNEVPEKERERKLTDGGMDIYGLTNIKLVHKEGNAVIRRHLESLPLETFDSILILADESVEDSIVHSDSRSLATLLLIRDIQSKRLPSKELKSPLRYNGFCHSSWIREMQHASDKSIIISEILDSRTRNLVSVSKISDYVLSNELVSMALAMVAEDKQINRVLEELFAEEGNEMCIRSAEFYLYEQEELSFFDIMVRARERDEVVIGYRLANDDQAIINPEQKSEIRKWSLDDVFVVISKGD

SEQ ID NO: 56309 - protein, 160 aa, Oryza sativa
MSDSEEHHFESKADAGASKTYPQQAGTIRKNGYIVIKNRPCKVVEVSTSKTGKHGHAKCHFVAIDIFNGKKLEDIVPSSHNCDVPHVNRTEYQLIDISEDGFVSLLTESGNTKDDLRLPTDDSLLGQIETGFGEGKDLVVTVMSAMGEEQICALKDIGPK

SEQ ID NO: 56310 - protein, 197 aa, Oryza sativa
MQLLGVACLLIASKYEEICPPQVEELCYISDNTYTKDEVLKMEASVLKYLKFEMTAPTTKCFLRRFLRAAQVCHEAPVLHLEFLANYIAELSLLEYSLICYVPSLIAASSIFLAKFILKPTENPWNSTLSFYTQYKPSDLCNCAKGLHRLFLVGPGGNLRAVREKYSQHKYKFVAKKYSPPSIPAEFFEDPSSYKPD

SEQ ID NO: 56311 - protein, 585 aa, Oryza sativa
MSPAARSLLLSAARRQRRRFSTEAPSSTPQQQLLPKGKRWDAVVIGGGHNGLAAAAYLARAGRSVAVLERRGVIGGAAVSESDLVPGFRFSRCSYLLSLLRPALIQELELERHGLKLLPRSPSSFTPCLDGRYLLLGPDAELNHSEISKFSENDAGAYPRYEEKLEKFCKLMDFVIDSPPPEMRHEYHLSMVDRMKDKVDKSVFWSKLLGIVMQQGQKDMVDFFDLLLSPASKILNNWFEGDVLKATLATDAVIGSMAGVHTPGSGYVLLHHVMGETGGQRGVWAYVEGGMGSVSSAISKAALEAGVEILTNAEVSQISVHHTSGKVQGVVLADGTEVLTSVVLSNATPYRTFVDLVPANVLPDNFLSAIKTADYSSATTKINVAVDRLPQFSCCKDFNPEGGPEHMGTIHIGSESMEEIDLAYREAANGVSSTRPVIEMTIPSVLDKTISPPGQHVINLFVQYTPYKLSEGSWQDSNVRKSFAERCFSLIDEYAPGFSSSVVGYDMLTPPDLEREFGLTGGNIFHGAMGLDSLFLMRPAKGWSDYRTPVKGLYLCGSGAHPGGGVMGAPGRNAASVVLEDLRTK

SEQ ID NO: 56312 - protein, 301 aa, Oryza sativa
MARKCSYCGNYGHNSRTCSSSASAGHRDTTMLCDGGDGGGGSGLRLFGVQVHVAAGGGGGGGGGGLPMKKSYSMDCLQLAAAGAAPGSLVSPSSSSSSSMLLSIDEGGLERASNGYLSDGPHGRIVQERKKGVPWSEEEHRLFLVGLEKLGKGDWRGISRSYVTTRTPTQVASHAQKFFLRQSSIGKKKRRSSLFDMVPICENGARVSEQLSGEGAAAAAAASTSLSLMNTHETSSDRVAAIDLNSTEEDDTVGASGRPFFPVVLMEQQQQASHGHGHHHHCTPLDLELGMSVSSTPSIGT

SEQ ID NO: 56313 - protein, 81 aa, Oryza sativa
MCPCQRLSQLAWQVTHLMFLVQLQPQSIHLQGYSRIPWMNWAGLQNLKGKNMIILLLTVAYSRTQALLIRSQNQNLCLPQS

SEQ ID NO: 56314 - protein, 236 aa, Oryza sativa; identical to SEQ ID NO: 30566

SEQ ID NO: 56315 - protein, 71 aa, Oryza sativa
MVRGRLRPSATSQSIWLSIGLGLRPLHHLVVDLPVSTIQAHSAFRSGDGCLAVAGFGELGGRGRSPRRWWS

SEQ ID NO: 56316 - protein, 325 aa, Oryza sativa
MSHQSDTSSSSNDSEDSNIIHPASIYSMEEFIAEQSIVDNFLQRIIVKIEAKIEAQKASTSHPRSGERKYVKRNREEGHRRLVEDYFSKDPIYSDKQFRARYRMRRPLFLRIVHALGEWSPYFTSRRDAINRQGLSPLQKCTIAIRALACGTLGDAIDEYVDTGISTALECLDWFVEGVIDNFGEEYLRSPTSEDMQHILQMNEARGFPGMLGSIGCMHWEWKNCPVIWRRHLTHTDHGATTMILEAVASNDSWIWHAFFGAIGSNNEITILGQPQLFTELLKGQAAHVQFSVNRRQYNTGYYLADGIYPEGNVFVKTVTLPQSE

SEQ ID NO: 56317 - protein, 599 aa, Oryza sativa
MNMARSGDVSRCHRCGLWSNGSAPITVSASITMRSSRVTAHAVYLDYPTRTEQKNGGNLVVMRPDRRRPRDDFFKGEGGGGSLVVVQPDRDRRPQDDFGRAAADSEKDVSPIHAKPRKPLDQNPEGMDVAGFSKHGGKCYADNLRRYCNSGKLIQACCVIDEMVLHGQIPETKCCVRIIRGLVKTGKANKARHVLEVMVLSGGVPDTISCNMLIAQLCRGGQLSSALQVLEDMRFSGCSPSGITFNTLIRCMFNQRMYDRAISFWKEQLRLGWPPYEMTSTLLVDLVCKNCGPQKALEVLDELSLEGCQPDVVTYNALISASCKAGRLNDAKFILTRLAAEGLEPNGTTYCILLHALCNMRRWDEVCDLLEDMNQVNRDPDVTTYNIFINYFCKYGHLDQAIDVLERMVINNCSPDIVTCNTLLNAISKKGMVEEALGIARCIRENGYKLVLITYNTLIDALAKKAEVKKAMVLFDEMLSDGISPDDITYGSLVMGFCKKDMADEALDLLNQMLTLGFEVKTTTFVMVIQALCRDGKVEAAAEITKVMLSKNSIPGNSLCSSIVTKVAKSGWNKEAQMLHQKLVECEILKEDAEVILSS

SEQ ID NO: 56318 - protein, 422 aa, Oryza sativa
MGISARWLKSLVGMRKVEKQQQQSKEDGDGGRVAQKRDGANHFHCQNQHGQDHDNLGAPGEFPDENGPSEGDSNALSCSEPAFSSPNVPVPQTEEELKEIWAATVIQTVFRAFLARRARRALKGLVRLQALVRGHIVRKQAAITLRCMQALVRVQARVRARRVRIALESQTDQQAILQEKINETHVREIEDGWCDSIGSVEDIQAKLLKRQEAAAKRERAMAYALTHQWQARQHAAITAFQPDKNSWGWNWLERWMAVRPWESRFLGSYAADGIPVSSGAMQDEENAVYTPHKKHVRRQTSTLHSNILNQKTCLPNSEGGGSSSNRSGGSASAKSKLKLSSREGCDEISSRPSGLGTRSSSNPKERTGHLDPQGNKRFSLPASCVEAGKRMTNKSAVNRSLKVTKHHLASSIELPRRVELQT

SEQ ID NO: 56319 - protein, 658 aa, Oryza sativa
MESGQPNSAAAADKTQNSSVPPVEGVAGGGTSYGWVDGGLQASSLGNGAIDPTKIHSADLLHVWSMPSTANVSQQEAPRPLEHVNLLAARNERESFQIALRPKVSWATSGIAGSVQVQCTDLCSSAGDRLVVGQSVTLRRVVPMLGVPDALVPIDPLNSQINLLPGETSAIWVSLNVPCGQQPGLYEGEIFISAVRAEAESRGESLTKSERYQLYKELRNCIDITEPRDYSSSEEMVQRLTSASTTLRRMLALPSFQDCQENNGLGDMMDEDIMNNVAVRLKLSLTVWDFTLPLTPSLPAVFGISETVIEDRFCLEHGTKGWYDALDHHFRWLLQYRISPFFCRWGDSMRILAYTCPWPADHPKAKEYYSDPRLAAYAVPYAPILSSTDAAKNSLRREVEILKSEAHWSKSYFYLWDEPLNMEQYDVICSISNELRSYASDVRILTTYYCGPSGSELAPSTFEAFVKVPNVLRPHTQIFCTSEWVLGTREDLVKDIVAELRPDLGEEWWTYVCMGPSDPQPNWHLGMRGTQHRAVMWRVWKEGGTGFLYWGTNCYEKAMIPSAEICFRRGLPPGDGVLFYPGEVFSSSHEPVASTRLERILSGMQDIEYLKLYSSRYGREEGLALLEKTGVYLGPDRYALDHGPIDVMRGEVYRTCRS

SEQ ID NO: 56320 - protein, 340 aa, Oryza sativa
MLPATSTVPPTSPLPHSRAAPRRHLRAGLLHGSVATAAVVRACGVTTGHRRRMGSVRASPRAGGWEVAMADKEGVGVERLVEVAQRAADAAGEVLRKYFRQRVEIIDKEDQSPVTIADREAEEAMVSVILKSFPSHAVFGEENGWRCVEKSADYVWVLDPIDGTKSFITGKPLFGTLISLLYKGKPVIGIIDQPILRERWVGVDGMKTTLNGQEISVRPCNILAQAYLYTTSPHLFAGEAEDAFIRVRDKVKVPLYGCDCYAYALLASGFVDLVVESGLKPYDFLSLVPVIEGAGGSITDWKGNKLHWPVSAESRPESFNVVASGDARVHKQALDALQWH

SEQ ID NO: 56321 - protein, 216 aa, Oryza sativa
MAGATAAGAAAAAAGTGAGSPCGACKFLRRRCVPECVFAPYFSSEQGAARFAAIHKVFGASNASKLLSHLPVADRCEAVVTITYEAQARLSDPVYGCVAQIFALQQQVAILQAQLMQARAQLACGIQSSSHSPVSWPDSGSISALLRQDMARRPPGGALDDCFGGGGALLPELMAAGFKDDVAAVQMQQHCSKAVDAGELQYLAQAMMRSTSNYSQ

SEQ ID NO: 56322 - protein, 486 aa, Oryza sativa
MASTDRSKKLRVLLIPFFATSHIGPFTDLAVRLVTARPDAVEPTIAVTPANVSVVRSALERHGSAATSVVSIATYPFPEVAGLPRGVENLSTAGADGWRIDVAATNEALTRPAQEALISGQSPDALITDAHFFWNAGLAEELGVPCVSFSVIGLFSGLAMRFVTAAAANDDSDSAELTLAGFPGAELRFPKSELPDFLIRQGNLDGIDPNKIPQGQRMCHGLAVNAFLGMEQPYRERFLRDGLAKRVYLVGPLSLPQPPAEANAGEASCIGWLDSKPSRSVLYVCFGTFAPVSEEQLEELALGLEASGEPFLWAVRADGWSPPAGWEERVGERGVLVRGWVPQTAILSHPATAAFLTHCGSSSLLEAVAAGVPLLTWPLVFDQFIEERLVTDVLRIGERVWDGPRSVRHEEAMVVPAAAVARAVARFLEPGGAGDAARLRAQELAAEAHAAVAEGGSSYRDLRRLVDDMVEARAAGGEAAAAPQPQ

SEQ ID NO: 56323 - protein, 275 aa, Oryza sativa
MGSFASPLDAAPAPPTAKPSPPPAPAPANGLVTQEELKRVAAHRAVEMVEPGMTLGLGTGSTAAHALDRLGDLLRSGELAAVAGVPTSLKTEAHAARVGIPMLPLGEAGGIDLSIDGADEVDPELNLVKGRGGSLLREKMIEGSGGRFVVIVDESKLVPRLGCTGAVPVEVVPFGCDHTLGLVRKVFDGLPGFSARLRTVASKDGEGKEEMFVTDNGNYIVEMFFEDGIRGDLNEISDRLLRITGVVEHGMFLGMATSVVVAKKDGTVALLHKKK

SEQ ID NO: 56324 - protein, 401 aa, Oryza sativa
MEYAAPAGAGAGGYYYYPPSQQHKPRRPPRPAARWVKHWIPQDLATSSGKCALYKWVREDVYKNLKDGKAVPEPEAVKPEPTTEILFLCSYENCGKTFVDVAALRKHAHVHNERQYICQEPGCGKKFVDSSKLKRHHLIHTGQKDFICPHPGCGKAFSLDFNLRSHLKTHALENYHVCPFPACGKRFTSDSKLKSHVKGHEKTGTPITAQYVPSSDKPQSSSKPATPATTKPTTPAATKTTTPASTKPTTPAPTSFAERPYVCPYDGCGKAYIHSYKLNLHLKTQHPEHGQEENGRIAAHASEHAVNDRANQYNYAEIVDLAPNPKRSKTNSGHKTPSSNKAYNVKISSVLPADISGVKNQWPGKYEDDSEETEEDQGNNIEDGWRYGNQNADDEETEYED

SEQ ID NO: 56325 - protein, 78 aa, Oryza sativa
MSCCGGSCNCGSSCKCGSGCGNMYPDLAEKTTNTSATMVLGVAPAKEQFEGVGKAAESGEAAHGCSCGSSCKCNPCNC

SEQ ID NO: 56326 - protein, 707 aa, Oryza sativa
MGKSSKKSAVEVAPTSVSVSEGKSGKKGKRNAEDEIEKAVSAKKQKTVREKVVPSKEEAKKVKKQPPPKKVESSSSEEDSSESEEEVKAQPKKTVQPKKAAQPAKEESSDDSSDDSSSDDEPAKKPVARPNKAALSTNSSSSDDSSDESLSDDEPVKKPAAPLKKPVALATNGSKKVETDSSSSDSSSDEESDEDDKKTAAPVKKPSVAAIQKKTQESDSSDSDSDSESDEDVPTKAPAVAKKKEESSESSDSESDSDSDDEAAAVKKEEESSDSSDSDSESESDSDEPAKPTIPAKRPLTKDTKKGQSKDESEDSSDESSEESGDEPPQKKIKDSTTSGTTKPSPKATKKEISSDDESDEDDSSDESSDEDVKQKQTQAKKQAPVAQESSSSDESSEEDSDMESDEPAKTPQKKETAVSVGSNKSATKPGQEEPKTPASNQNQATGSKTLFVGNLPYNVEQEQVKQFFQEAGEVVDIRFSTFEDGNFRGFGHVEFATAEAAKKALELAGHDLMGRPVRLDLARERGAYTPGSGRDNSSFKKPAQSSGNTIFIKGFDTSLDIHQIRNSLEEHFGSCGEITRVSIPKDYETGASKGMAYMDFADNGSLSKAYELNGSDLGGYSLYVDEARPRPDNNREGGFSGGRDFNSSGRGGRRGGRGDGSRGRGDRGRGRGFGRGDRGHGGRGTPFKQSAGTPSAGKKTTFGDDD

SEQ ID NO: 56327 - protein, 320 aa, Oryza sativa; identical to SEQ ID NO: 33231

SEQ ID NO: 56328 - protein, 402 aa, Oryza sativa
MASAACSSSASALVRLTGPIHLCSAPPRGSARRRHASVRCSFAPVETARIKVVGVGGGGNNAVNRMIGSGLQGIEFYAINTDSQALLNSQAQYPLQIGEQLTRGLGTGGNPNLGEQAAEESKEAIANALKDSDLVFITAGMGGGTGSGAAPVVAQISKEAGYLTVGVVTYPFSFEGRKRSLQALEALEKLERSVDTLIVIPNDRLLDVVDENTPLQDAFLLADDVLRQGVQGISDIITIPGLVNVDFADVKAVMKNSGTAMLGVGVSSSKNRAQEAAEQATLAPLIGSSIEAATGVVYNITGGKDITLQEVNKVSQIVTSLADPSANIIFGAVVGDRYTGEIHVTIIATGFPQSFQKSLLADPKGARIMEAKEKAANLTYKAVAAATVQPAPAATWSRRLFS

SEQ ID NO: 56329 - protein, 408 aa, Oryza sativa
MAAAWVLAAAAALALWAAAAEGARSPAARVHRHLKRLNKPAVKSIESPDGDIIDCVHLSHQPAFDHPLLKNHTLQMRPAYHPEGLYDDDKRSVASDNAGEKPMLQLWHQKGRCPEGTVPIRRTKKDDLLRASSLRRYGRKRHTAVNPLSIDPNMLNEGGHQHAIAYVEGDKYYGAKATINVWEPKIQQPNEFSLSQLWILGGSFGEDLNSIEAGWQVSPDLYGDNNTRLFTYWTSDAYQATGCYNILCSGFIQINSEIAMGASIFPISNIAGSQYDISILIWKDPKEGNWWMQFGREYVLGYWPSFLFSYLVDSASMVEWGGEVVNSEPDGTHTSTQMGSGRFPEEGFGKASYFKNIQVVDSSNQLKAPKGVGTYTEQSNCYDVQNGNNGDWGTYFYYGGPGKNSNCP

SEQ ID NO: 56330 - protein, 235 aa, Oryza sativa
MTLLVESSSSSRREKFQRDFLFIYFWILGSAADAVEYRSRGARRSKLFSGCAGVAEGGAARRGGMDTMRGALERARMLVGMEVDEESAPEEQSFFDDVTRNCALTTTQRLYGFAICLAAGLTCTFLSMLVFFNPVKFGVTFTLGNLMALGSTAFLIGPKRQFDMMLDSVRIYATAVYIASIIIALFCALFVHSKLLTLLAIILEFGALVWYSLSYIPFARSVVSKVMTSCFDTEF

SEQ ID NO: 56331 - protein, 553 aa, Oryza sativa; identical to SEQ ID NO: 35511

SEQ ID NO: 56332 - protein, 920 aa, Oryza sativa
MASSQEKAKTGVLRNAAALLDEMQLMGETQGAKKVINSELWHACAGPLVCLPQRGSLVYYFPQGHSEQVAATTRKIPNSRIPNYPNLPSQLLCQVHNITLHADKDTDEVYAQMTLQPVNSETDVFPIPTLGAYTKSKHPTEYFCKNLTASDTSTHGGFSVPRRAAEKLFPQLDYSMQPPNQELIVRDLHDNMWTFRHIYRGQPKRHLLTTGWSLFVGAKRLKAGDSVLFIRDEKSQLLLGVRRATRQQTMLSSSVLPTDSMHIGVLAAAAHAASSGSSFTIYYNPRTSPSPFIIPVARYNKATYMQPSVGMRFAMMFETEESSKRRYTGTVVGISDYDPMRWPNSKWRNLQVEWDEHGYGERPERVSIWDIETPENTLVFPSSTLNSKRQCLPGYGVSVPGMEIGSANMSSFPRAQGNPYGSLQHIPAVGSELAIMLLNQSGQTLGSPLSFHQSSYSSIIQNVKQNYIPPLTVSTSACLTKQESLPSDDAQHQFHMANMQNGDLEGSEVQPVIDSISESKLNATSRDPRNTDSYTSRSTSEQNSKGEPRGKTRRSKKGLPHKTVSEKSDLSSAPSWICDNQQVGLESKLVGCDEQVNCGNIEDSSGALTQGNFVGQPHGHQVEQKGVLSPQKVESSKSPDGGKSVNSFPNQGCFSRFIDGLDWMTQPSYYQDSNVIQPAGVSENIFSSSADIPPSMIADTMETFQASCLSDCLPNSIQEFISSPDLNSLTFLSPDMQNLEVQLQHDGSNLPSTSNSFVQMSFSEESASQSANLSGLHMESTHRSINTTSCSQPMSTGGFDAGMYSKLPRLKESQILSLPEIHTNSMGTSACSMDATEYSLDRSAKPMKPPVRTYTKVQKQGSVGRSIDVTGFRNYHELRSAIACMFGLQGKLEHPGSSEWKLVYVDYENDVLLVGDDPWE

SEQ ID NO: 56333 - protein, 239 aa, Oryza sativa
MAGSGDELMLLGKWPSPFVTRVELALGLKGLSYEYVKQDLVNKSELLLASNPVHKKIPVLIHNGKPVCESSIIVQYIDEAFPDAGAGAALLPADPYERAVARFWVAYVDDKFVPAWVATFRGKTEEEKAEGMKQLLAAVETLEGALKDCSKGKPFFGGDTVGIVDVALGGLISWVKATEVLAGSKIFDEEKAPLLAAWAQRFGELDVAEKVLPDVDGVVEFAKMRLAEAAAAAAAASKN

SEQ ID NO: 56334 - protein, 45 aa, Oryza sativa
MENGTKAVDVGQRQLKIMEECLAATIPDSQSFVHSALLSGLASIT

SEQ ID NO: 56335 - protein, 300 aa, Oryza sativa
MMMAREVSSEEEAGGGDELRRGPWTVEEDLLLVNYIAAHGEGRWNALARCAGLKRTGKSCRLRWLNYLRPDVRRGNMTAEEQLLILELHGRWGNRWSKIAQHLPGRTDNEIKNYWRTRVQKHAKHLNCDVNSQQFKDLMRYLWMPRLLERIHRSSQSQSHDADDADLSVSAATSCITSDLVVDAHHPPLAMADSNDSAAMWQQHQAPQMSVAGAPPPTTTMAQHVVLPTAAASCHQMQDQFVCARAAETTTCCWSESESLPGLAGLYYDDAAAALPEFDVETMAMWGPEDDPWYTQMLGL

SEQ ID NO: 56336 - protein, 97 aa, Oryza sativa
MFAFISPASSGRPEGLSHHSPGQGSSAANSHRQMSSNKRLTYCVLLSVFFCVCVYANIAKENIGHQLLIDRPSLQLNSIPVNHAIWNWKLPSYPHLY

SEQ ID NO: 56337 - protein, 570 aa, Oryza sativa
MSTRSAFLAAGVAIAAAIFLLRPASDLSRDLGEAVADMILANATIYTADPAMPFAEAMAVRAGRVLRVGGYYSVKELKGRHTMELNLSGNVVLPGFIDSHVHFIDGGLQLARVPLRGVTSKDDFINRVKEAVKDKHPGQWIFGGGWNNDFWGGDYPTAAWLDDISPDNPVWLSRMDGHMGIANSLAMRMAGINKNTNNPVGGTIMRTTEGEPTGLLVDAAMKLVFDVISEVSIHERRDALLRASRHALMRGVTTVVDVGSYFPGKSEKQVWQDFTDIYEWAHSVETMIMRVCLFFPMPTWSRVYDLIHEKGRMLSQWIHLGGVKAFLDGSLGSSSALFYEHYKDDPRSYGLQLVDMDYLLNTTLELDKSGLQIAIHAIGDKANDMLLDMYEKVVDLNGMKDHRFRIEHAQHLAPGAAKRFGKHGIIASVQPDHILDDANSAGKKIGIERAERSSYSFRSLLDGGAHLAFGSDWPVSDINPLQAIRTAVSRKPVGWEVPWIPAERLSLDDSLKAHTISAAYACFLDHVLGSLSEGKYADFVILPSTSWNEFGSDITDHVLATYVNGKQAYP

SEQ ID NO: 56338 - protein, 308 aa, Oryza sativa
MTRVQTQIYSRRVKMEEEKQALQRQLQLKHQRELEKMKIDEDWDHSHQSKEQVETSLMMKQEAALRRERALAYAFSHQWKNSGRTITPTFTDQGNPNWGWSWMERWMTSRPWESRVISDKDPKDHYSTKNPSTSASRTYVPRAISIQRPATPNKSSRPPSRQSPSTPPSRVPSVTGKIRPASPRDSWLYKEDDLRSITSIRSERPRRQSTGGASVRDDASLTSTPALPSYMQSTESARAKSRYRSLLTDRFEVPERVPLVHSSIKKRLSFPVADKPNGEHADKLMERGRRHSDPPKVDPASLKDVPVS

SEQ ID NO: 56339 - protein, 329 aa, Oryza sativa
MKQRQFGFNGRQQYAAAAQHGHREQGVDSYGVAAPHHFPSPSPSPRHPVPFGHANPMLWVHSLPNVAGGSPYRNQSFSVGNSVAGSTVGVYGGPRDLQNPKVTQMTIFYDGLVNVFDNIPVEKAQELMLLASRASIPSPPSAARKSDSPISAAAKLTVPEALPARQIVVQKPEASVPLVSGVSNPITIVSQAVTLPKSFSSSNDSAGPKSGGLPLAVTPLSQASPSQPIPVATTNASAIMPRAVPQARKASLARFLEKRKERVSSVAPYPSSKSPLESSDTIGSPSTPSKSSCTDITPSTNNCEDSLCLGQPRNISFSSQEPPSTKLQI

SEQ ID NO: 56340 - protein, 157 aa, Oryza sativa
MPSSPWIPTAGAPPPRAAPAVVYSWLSERHPVKEAGAGAGASNAQESRPRVSPAENSEVETREHEEKVNKYQAVLAARLKAKYFSGKAFGKENVFEEMTIQSETILLSRCPFSSLFADPAKFCREKSCTKEDIYPSLTNASFAKHNHLSLVREDSSK

SEQ ID NO: 56341 - protein, 465 aa, Oryza sativa
MAAAVAVVVGCVLLGGVWGFPEEDLVARLPGQPVVGFRQFAGYVDVDEKAGRSLFYYFAEAAEGAAAKPLTLWLNGGPGCSSVGGGAFTELGPFYPRGDGRGLRLNKKSWNKVSNLLFVESPAGVGWSYSNTSSDYNTGDAQTANDMYKFLLGWYKKFPEYRSRGLLLSGESYAGHYIPQLTDVLLTHNEKSNGFKFNIKGVAIGNPLLKLDRDVPATYEYFWSHGMISDEIFLSISHSCDFEDYTFSNPHNESKSCNDAIAEANSIVGDYVNNYDVILDVCYPSIVMQELRLRKYVTKMSVGVDVCMTYERYFYFNLPEVQQALHANRTHLPYGWSMCSDVLNYSNKDGNINILPLLQRIVEHKIPVWVFSGDQDSVVPLLGSRTLVRELAHDMGLHVTVPYSSWFRRGQVGGWVTEYGNILTFATVRGASHMVPFAQPDRALGLFQSFALGRRLQNTTHPPIN

SEQ ID NO: 56342 - protein, 274 aa, Oryza sativa; identical to SEQ ID NO: 37196

SEQ ID NO: 56343 - protein, 1073 aa, Oryza sativa
MEAQVETPKQPTVLDLFTKSLQEQDNCEVLSRKLFKFGDKEILGITTVALGKTKVHLATNYMEPLILHWALSKENGEWQAPPSSILPSGSSLLDKACETSFSEYELNGLHCQVVEIELDDGGYKRMPFVLRSGETWMKNNGSDFYLDFSTKVAKNTKDTGDAGKGTAKALLERIADLEEDAQRSLMHRFNIAADLVDQARDNGLLGIIGIFVWIRFMATRQLIWNKNYNVKPREISKAQDRFTDDLENMYRTYPQYQEILRMIMSAVGRGGEGDVGQRIRDEILVIQRNNDCKGGMMEEWHQKLHNNTSPDDVVICQALLDYIKSDFDIGVYWDTLKKDGITKERLLSYDRPIHSEPNFRSEQKDGLLRDLGNYMRSLKAVHSGADLESAIATCMGYKSEGEGFMVGVQINPVKGLPSGFPKLLEFVLDHVEDKSAEPLLEGLLEARAELHPLLLGSPERMKDLIFLDIALDSTFRTAVERSYEELNNVEPEKIMYFISLVLENLALSTDDNEDILYCLKGWNQALEMAKQKNNQWALYAKAFLDRTRLALASKGEQYYNLMQPSAEYLGSLLNIDQWAVNIFTEEIIRGGSAATLSALLNRIDPVLRNVAQLGSWQVISPVEVSGYIVVVDELLAVQNKSYDKPTILVAKSVKGEEEIPDGVVGVITPDMPDVLSHVSVRARNCKVLFATCFDPNTLSELQGHDGKVFSFKPTSADITYREIPESELQSGSLNAEAGQAVPSVSLVKKKFLGKYAISAEEFSEEMVGAKSRNVAYLKGKVPSWVGVPTSVAIPFGTFEKVLSDEINKEVAQTIQMLKGKLAQDDFSALGEIRKTVLNLTAPTQLIKELKEKMLGSGMPWPGDEGDQRWEQAWMAIKKVWASKWNERAYFSTRKVKLDHDYLSMAVLVQEIVNADYAFVIHTTNPSSGDSSEIYAEVVKGLGETLVGAYPGRAMSFVCKKNDLDSPKVLGFPSKPIGLFIKRSIIFRSDSNGEDLEGYAGAGLYDSVPMDEEDEVILDYTTDPLITDQGFQKSILSSIARAGHAIEELYGSPQDVEGAVKEGKLYVVQTRPQM

SEQ ID NO: 56344 - protein, 237 aa, Oryza sativa
MRHGGHRHGEGFHGKEEKQQLVFEMPVEPATRGEERREEEEGVVLPVAEPDPDSRRQYAAVAAAEEEDEDEMARLHNGRRSHHHHHRHHHHHHDENEEDEHEQADEASPAVERLISFHRRRHHHHHHEDDHEQREEGAPMKRFRHNHEEEEESEMRTKRFHHHHHKDDDERELEEMARRWIRKALMSSRMHHHRGCRFHHHHHHLSFRHRAEDAAAAGEEEEKGGVMSWLKDFVNRF

SEQ ID NO: 56345 - protein, 510 aa, Oryza sativa
MAVMEEQQEGAAGVMRRRPKTKIVRTLGPASRSVEMIGRLLRAGMCVARFNFSHGSHEYHQETLDNLRAAMESTGILCAVMLDTKGPEIRTGFLKDGKPVQLKKGQEITVSTDYSIKGDDNMISMSYKKLAVDLKPGSVILCADGTITLTVLHCDKEQGLVRCRCENTAMLGERKNVNLPGVIVDLPTLTEKDKEDILKWGVPNKIDMIALSFVRKGSDLVEVRKVLGKHAKSIMLMSKVENQEGVANFDDILAQSDAFMVARGDLGMEIPIEKIFYAQKVMIFKCNIQGKPVVTATQMLESMIKSPRPTRAEATDVANAVLDGTDCVMLSGETAAGAYPELAVRTMAKICLQAESCVDHAAVFKSITASAPIPMSPLESLASSAVRTANSAKAALILVLTRGGTTARLVAKYRPSMPILSVVVPELKQTDSFDWTCSDEAPARHSLIVRGVIPMLSVATAKAFDNEATEEALGFAISNAKAMGLCNSGESVVALHRIGTASVIKLLTAN

SEQ ID NO: 56346 - protein, 481 aa, Oryza sativa
MASNADQHAAANGGGGTTPAATGSPPAGKKAAAAAAWKRPGNGAAVPVVVAPGSPIMDADSWPALPGLASPPPTTLTPTPMPPKASPKVAPLPPPAEAVIPPISLGNSGAPDANPDHEAPVRNPPARRALVMPVGDGLDKRAPGSEPSPVYTPNARSNGGGDHHQNGRYGSHPHSRGSGYGGGGNRRGNGGGGGGGRRGQEHHGGFDGQRRGGGRRDGHGPGHQQRGHHPSYIRAPLAVVTAAPPPPPPFVNPATPQTPPYGAPIGFPEIAPHVYYFTSPLEGVQALPFVPHPASPPAMLIPQFDPLRAELLKQIEYYFSDDNLCKDIFLRRHMDDQGWVPLPLIAGFNQVKKLTNNVQFILETVLQSTVVEVQGDKLRKRERWEIWLLPKQGYSAGNSSGSLSPVTSNIDSLASQFQSVGLEGAGYHASQGMPGEALLTRSATSVSLGYQAPPFGGLYSNGSGPLFGQKSARSLLRSDTF

SEQ ID NO: 56347 - protein, 324 aa, Oryza sativa; identical to SEQ ID NO: 31015

SEQ ID NO: 56348 - protein, 910 aa, Oryza sativa
MHAPRKFKKAFMERLLLSLQVAGLTSKSMGLRERRDAVRLSSDVAMASARGRAAEAAIALQPKQAVRVYQVGDKVEVRRDREVYGHSWFHAKVAKVIDRMSYLVEYSDLEKGEGEAVAKAVEYLHWRFIRPSEERSPRDCDFRIGPGAAVEAYCDGAWSPGVVRSVVGEGEYEVSVNGKTKEVVVTKVRELLQPQYKWNGKNWRIVSAKRHLRQQSMSGKSPSSPVDVFSSDDEHRHDTESSARRRSIKRSRKEFNATQQPEGMLPEDSEDVSHSEMNTPLSELCKSSGSNHSPKSCSDPSGMKKIQVLSKKIVSNCLVPVKGILDASTGHRIPQNESREDGIGKTMVNQEIISDMMLTNGQANTSACGTSMNEGYAMLSTKKFGKQKMALSRRYNPVRKARGGLLSVQQLHTKKIMPSELKRGKMRLIHALQDMNDPSDNIQLKGNSTSPSREIICALSVSSQCNTPSPLGKQIKAFDFVSREADSGSNTKFLILKKFARKKGSKESDSPHNSLDATSTVQPIRRKKAAGRLKGSSVERQLEGETHIQQQLNKALEDNLNANEVTNQELLPLTPPGFESVVNGKRSRDWNTDGFSEVNLNSSLFDEELTATINSICQDNHNRDAESDNVATEVAEISHLMEKSMLPLDCSVGHEVGGKVGQGSIQLHIGNSGSLPCTSDNAILRRCSFGGNSMVSDISKCQLTGQQAPFTKRSHVWSLFEEMDVFRKMPQQPHFLPLKHHPLGLREGTALGLMWSYTDAVDNISKLCITDSMEIFEDHIKTLTILEENGFSVQSLQQILTKLLQIRSDYTNSLRDGEKLKEQIADKAFAVSRVDALLDENDSAIAKLEQELGKLRWKGQKMSKKKEDEDAELSRLKAENNNAEEAHGDAKRQFDSIRAELRQHLAIDSQ

SEQ ID NO: 56349 - protein, 514 aa, Oryza sativa
MAVAAPGQLNLDESPSWGSRNVDCCFEKLEQIGEGTYGQVYMAKETETNEIVALKKIRMDNEREGFPITAIREIKILKKLHHQNVIQLKEIVTSPGPERDEQGKPIEGNKYKGSIYMVFEYMDHDLTGLADRPGMRFTVPQIKCYMRQLLTGLHYCHVNQVLHRDIKGSNLLIDNEGNLKLADFGLARSFSSDHNGNLTNRVITLWYRPPELLLGSTRYGPAVDMWSVGCIFAELLNGKPILTGKNEPEQLSKIFELCGTPDELIWPGVTKMPWYNNFKPQRPMKRRVKESFKHFDQHALDLLEKMLTLDPSQRVSAKDALDAEYFWTDPLPCDPKSLPKYEASHEFQTKKKRQQQRQAEEAAKRQKLQHPPPHSRLPPIQNPGQPHQIRPGQPMHNAPPVAAGPSHHYAKPRGPGGPNRYPQGGNQGGYNPNRGGQGGGYGSGPYPQQGRGPPPYPGGGMGGAGGPRGGGGSGYGVGGPNYQQGGPYGASGPGRGPNYNQGGSRNQQQYGNWQ

SEQ ID NO: 56350 - protein, 183 aa, Oryza sativa
MDRRSSAPSSRRRKESLLVAEGLVWKNRGGVAMRGRQIGQRNFFNLSDPAQVWWRCPLPASGRHATTVAALAALSPDTMTHPLRLRPLPLQMLGRRRCLLGWRQLSDSRTAGNKIFGSLCFSRMLRWCWSDWCLHDLLVDGLGMIVAHQGIAAGHQVNFSSSSFVELQAEVERQQINQCHPSS

SEQ ID NO: 56351 - protein, 415 aa, Oryza sativa
MSKRSCGGGGARLQCAAADWGGCFLALPPAAAAAVPSGGDTDGGFNLAWTLHQSFHPASGLFASVGVGFPATSSSSPSPPDAPGDPYAKYVSPEIEHHALPGQSVEVELMEKGKKNKKKTNKAFKLKIKVGNPHLKRLISGGIAGAVSRTAVAPLETIRTHLMVGSNGNSTAEVFQSIMKHEGWTGLFRGNFVNVIRVAPSKAIELFAFDTANKFLTPKSGEQKKVPLPPSLVAGAFAGVSSTLCTYPLELIKTRLTIQRGVYDNFLHALVKIVREEGPTELYRGLTPSLIGVVPYAATNYFAYDTLKKAYKKMFKTNEIGNVPTLLIGSAAGAISSTATFPLEVARKHMQVGAVGGRKVYKNMLHALLSILEDEGVGGLYRGLGPSCMKLVPAAGISFMCYEACKKVLTEEEDD

SEQ ID NO: 56352 - protein, 115 aa, Oryza sativa
MCWSRTCVPTGPPPPTPRSGSCSSSASRASSPTSASTTSPSSSGRSLPACATTSQIPSSRFARAARLPSATYSILPTTPLAATSASLVCAATLSPSSSSSSLESLYLDWNLTSSL

SEQ ID NO: 56353 - protein, 314 aa, Oryza sativa
MGSGSLLKVLAKNFDVLAGPLVALAYPLYASVKAIETKSPVDDQQWLTYWVMYSLITLFELTFASIIQWLPFWPSMKLIFICWLVLPYFNGAAFVYQNYVRPMFVKHQMVNIWYVPQKKGLFGKSDDFLTALDKFIEENGPEALKKLTNKAGKSSKQSGKSWKDSKSSKESKDSKSSKESKEPKPSKDSKQLKPPKVSKESKPLKDSKEDKKAVKEDKKAAAKDSKEQKKALKDSKELKKALKDSKEQGSQKDSDELKPKSNKRVTFAEVEPEKELKASNSDWHPTSEYHSVYPEHNSWSSSFMIFEDENSYWN

SEQ ID NO: 56354 - protein, 350 aa, Oryza sativa
MGRIPSLKNFNAFPHAEDHLLKKTYSGAIVTIFGLIIMVTLFAHELKFYLTTYTVHQMSVDLKRGETLPIHINMSFPSLPCEVLSVDAIDMSGKHEVDLHTNIWKLRLDKYGHIIGTEYLNDLVEKEHGTHNHDHDHEHEDEQKKQEHTFNEDAEKMVKSVKQAMENGEGCRVYGVLDVQRVAGNFHISVHGLNIFVAEKIFDGSSHVNVSHIIHDLSFGPKYPGIHNPLDETTRILHDTSGTFKYYIKIVPTEYRYLSKQVLPTNQFSVTEYFVPKRATDRSAWPAVYFLYDLSPITVTIKEERRNFLHFLTRLCAVLGGTFAMTGMLDRWMYRLIESVTKSKTRSVLR

SEQ ID NO: 56355 - protein, 292 aa, Oryza sativa
MGKLVAAIGKLLCCVQVDQSTVGIKERFGKYEEVLDPGCHCVPWIIGSRVAGELTLRLRQLDVRCETKTKDNVFVTVVASIQYRAMEDKASDAYYKLSNPKSQIQSYVFDVIRASIPKLELDDAFLQKNEIARAVEEELEKAMLAYGYEIVQTLIVDIEPDEKVKRAMNEINAAARLRVAANEKAEAEKIIQIKRAEGEAEAKYLSGLGIARQRQAIVDGLRDSVLGFSGNVPGTSAKDVMDLVLLTQYFDTMKEIGSTSKSSAIFLPHGPGAVADIASQIRDGCLQAHQTK

SEQ ID NO: 56356 - protein, 427 aa, Oryza sativa
MPPPPPRPRLAPNPAAIIHAALLKSSPASLPPRLSFNSLLAAAAASPHPRLRSLVLPALALAHRCPAAAGPLDSYALCSALRHASAPEAEPLHAHAARSGWLGSVFVSCAIAAAYGGSGRFLDARRLFDESPVRNAVFGNAVLAGYVNAGKWAPLLEFARRFSELRLQVDGYRMTAVVRACGELADADLGGQAHGHAIRRVGAVESDVFLTSALVDMYAKCGLVSHAKRVFDLAQQVNAVGIDVVLWTALLNAYGRHGMCKEVIQIYDRMVASGVRPDELTILAVLSACQHAGEVVKGLHYFESIHEDYGLTPTPDHFSCVVNMLCRAGMVIKAWEIVTSKGCGGEFGISTWVALLSACCDCGNVELGRMAAQRAIELEPNNGTIYVELSNLYARFGLWGEIDQLRELMKDNGLEKDAGLTWVELSS

SEQ ID NO: 56357 - protein, 227 aa, Oryza sativa
MRPPRGRGFGRGGRGDGGGRSGGGGRGFGRGGDSGGRGGRGRGGGRTPRGRGGGRGGGRGGMKGGSKVVVVPHKHNGVFIAKAKEDALCTKNMVPGESVYGEKRISVQNEDGTKVEYRVWNPFRSKLAAAVLGGVDNIWIAPGTRVLYLGAASGTTVSHVSDIVGPTGLVYAVEFSHRSGRDLVNMAKKRTNVIPIIEDARHPARYRMLVGMVDVIFSDVAQPDQGL

SEQ ID NO: 56358 - protein, 482 aa, Oryza sativa
MASVPLLAEWPAGKEKEEGRVRRRLPALAREAWEESKKLWEIVGPAVFLRLVLYSFNIISQAFAGHIGDLELAAFSIANNVITGLNFGFLLGMASALETLCGQAYGAKQCSMLGIYLQRSWIILFVFAVLLVPTYVFTAPLLEALGQPAALARKAGMVSVYMLPSHFQYAVLLPLNKFLQSQRKNWVTVVTAAAAFPVHIAVSWLLVSRLRFGVLGAAMSLGVSGWLVTLLQLAYVVGGGCPVTWSGFSPLAFVDLWGFVKLSVSSGVMVCLETWYYKILILLTGHLKNSELAVNALSICMSFQSWEMMIPVGFLAGTGVRVANELGAGNGKGAKFATIVSTTTSFLIGLFFSALALAFHDKIALVFSSSNAVIDAVDNISFLLAVTILLNGVQPVLSGVAIGSGWQAAVAYVNIGCYYFIGVPIGVLLGWSFNLGVFGIWAGMIAGTAIQTIILAHMTIQCDWNKEVLQASERVQRWGNPK

SEQ ID NO: 56359 - protein, 501 aa, Oryza sativa
MAAPPKAWKAEYAKSGRSSCKSCRSPIGKDQLRLGKMVQATQFDGLMPMWNHASCILSKKNQIKSVDDVEGIDTLRWDDQEKIRNYVGSAPATASSAAAISDKCTIEVAKSARTSCRRCGEKIKKGTVRVSSKLEGQGWYHASCFLEMSPAATVENFSGWEILSHEDKRAVLDLVKKDAPSSGQTSSKGSKRKNNQNDIHDCKAPKIIRSISEGTAEDKGKAVVSHDSNANSFDLQEKLKEQSDTLWKLKDELKKHVSTAELRNMLEANGQDTSGPERHLLDRCADGMLFGALGTCPVCSSFLYYHGGQYHCSGYVSEWSKCTYSTTEPVRSKKKWKIPDEMDNGYLTKWFKSQKAKKPERVLPPMSPEKSLCQSTQQNRSFLSEGLDKLRVSIVGQSKDVVDGWKQKLKDAGANFNATVTKDSSCLVLCSELESENAEVKKARRLKIPILREGYLGECIRKNRVLPFDLYKVEAALESSKGGTMTVKVKGRSAVHESSGL

SEQ ID NO: 56360 - protein, 429 aa, Oryza sativa
MYGALRDAASMREVFGSCAGVADVVSWNTVIGGYVKCGEMESAKRVFDEMPRRNGVSWSTMVGGYAAAGELDVAREMFDRMPAIGRNVVTWNSMVTGFARHGLLPLARKMFDEMPVRNLVSWNAMLRGYSVNSDMDGARELFDVMPEKDVVSWTCMISGYAQAGRYQDTLELFRAMQTESNVQPNEVTMVSVLSACANLTALEEGRWVHAFIDKHKMVLNNEYNLGAALIDMYAKCGRTDIAVKIFNSLDRKNVSAWNALITRLAMNGNARDSVDAFEQMKRTGEKPNDITFVGVLTACSHGGLVDEGRRCFQSMASTCGVQPEVKHYGCMVDMLGRAGLLEEAEELIRSMPMAPDVMVFGALLGACRMHKRFDVAERVQSEIHSLNLNAQQSGCHVLISDIYAAAGKWFDVLEARQVVQRSGIRKWTR

SEQ ID NO: 56361 - protein, 386 aa, Oryza sativa; identical to SEQ ID NO: 49756

SEQ ID NO: 56362 - protein, 89 aa, Oryza sativa
MLAPLRRIHFAHLPFLFPLNQATTTPLFTTGDKLFYSPFRPHPSSSLPSTTLPGCASLGNTNLRRRRSLPATGAPPPHSASPLSSLGSL

SEQ ID NO: 56363 - protein, 219 aa, Oryza sativa
MASSSSLRSTSCLASAAETDADNLCLRLGPPGSSITTTTTTGGADPAAKRSLGAKRSLESTDSMASGTGTSAAGDEHDDDTAAPAKAQVVGWPPVRAYRRNTFHQAAAAAAATKKGGDEKQKQQQQGGGLYVKVSMDGAPYLRKVDLKMCKGYRELREALDLLFTKCFSATASDGCSDGQFAIAYEDKDGDLMLVGDVPWEMFISSCKKLRIMKGSEAR

SEQ ID NO: 56364 - protein, 363 aa, Oryza sativa
MSPDATGEAGGGGGGGGDLFAANLKGSLLAVASSAFIGVSFIVKKKGLLRAGAAGSRAGVGGYGYLLEPLWWVGMVTMLVGEIANFIAYMFAPAVLVTPLGALSIIVSAVLAHFTLNEKLQRVGVLGCVLCIVGSTVIILHAPQERTPSSVDEIWHLAIQPDFLCYATAAVAVSLFLMIYCAPRYGQMNIMVYVGICSVIGSLTVMSIKAVGIAIKLTIEGINQAGYFQTWLFAVISITCIAVQLVYLNKALDTFNAAVVSPIYYAMFTTLTILASAIMFKDWSGQSASKIASEICGFLTVLAGTLVLHSTREPDQTLSADLYAPLPPKIYWHIQGNGDIGKQKEDDSLPCDIITVMRQDYFV

SEQ ID NO: 56365 - protein, 351 aa, Oryza sativa; identical to SEQ ID NO: 48793

SEQ ID NO: 56366 - protein, 92 aa, Oryza sativa; identical to SEQ ID NO: 35212

SEQ ID NO: 56367 - protein, 237 aa, Oryza sativa; identical to SEQ ID NO: 29957

SEQ ID NO: 56368 - protein, 456 aa, Oryza sativa
MEVFYYLVFGGLAAVVAGLELGKSGKDRVATTPAFNAFKNNYILVYSLMMSGDWLQGPYVYYLYSQYGFDKGDIGRLFIAGFGSSMLFGTIVGSLADKQGRKRACITYCISYILSCITKHSPEYKILMIGRVLGGIATSLLFSAFESWLVAEHNKRGFDPQWLSITFSKAIFLGNGLVAIIAGLFANLLADNLGFGPVAPFDAAACFLAIGMAIILSSWSENYGDTSDNKDLIAQFKVAAKAIASDEKIALLGAIQSLFEGSMYTFVFLWTPALSPNDEEIPHGFIFATFMLSSMLGSSIASRLLARKLKVEGYMQIVFSISAFTLFLPVVTNFLVPPSSVKGGGISFGGCLQLLGFCIFESCVGIFWPSIMKMRSQYIPEEARSTIMNFFRIPLNLFVCVVLYNVNAFPITVMFGMCAIFLFMAAILQRRLMVVSDLHRSTKAVEMTGEDEPLNP

SEQ ID NO: 56369 - protein, 103 aa, Oryza sativa; identical to SEQ ID NO: 36572

SEQ ID NO: 56370 - protein, 355 aa, Oryza sativa
MTTRIAPGVGANLLGQHSAERNQDATTYVGNLDPQVSEELLWELFVQAGPVVNVYVPKDRVTNLHQGYGFVEFRSEEDADYAIKILNMIKLYGKPIRVNKASQDKKSLDVGANLFIGNLDPDVDEKLLYDTFSAFGVIVTNPKIMRDPETGNSRGFGFVSYDSFESSDQAIEAMNNQHLCNRPITVSYAYKKDTKGERHGTPAERLLAANNPGSQKNRPHTMFASGPPTQGLANGAPVPRPFSNGAVPPQIQHVRPPPPPMQQFPPMQMNGQPVWPPQNTQLPPHMPPQMHYRPAVRPPPPNMMPPPPLGMVRPPPPPSSMPAPPMWRPPPPPQQAGGMPPPPMSMPPPPPPPSG

SEQ ID NO: 56371 - protein, 147 aa, Oryza sativa
MEPHSDNLVNYGKLCRERTQKSMIKNRKLMVLANDNGMSMRPLPGLVGLMSSGPKQKEKKPLPVKPSDMKRTRRDRRELENILFKLFERQPNWSLKNLMQETDQPEQFLKEILNDLCFYNKRGPNQGTHELKPEYKKSTEDADATAT

SEQ ID NO: 56372 - protein, 494 aa, Oryza sativa
MLEAEFRRLLADHSAPLPLAMQQLNTTSASTAAPSLIPAATVHKLSLILDRLIANGRQDRCLSVYADARGGVVSASLRALGLDYLRNPVDVAQALGPGVELWGRHLEFVVRCLLESERQLCNKVFGQRKDDASACFADVAAHAGILDFLSFGRAAADAKKDPIKLLRLLEVFDSLNKLRLDFNRLFGGKKACVEIQNQTRDLVKLLVDGAVEIFEELLVQVELQRHMPPPPDGGVPRLVSFVVEYCNRLLSEKYRPVLAQVLTIHRSWRKETFSDKMLVNAVLNIVKALEANFDVWSKAYDNVTLSYLFMMNTHWHFFKNLKATRLGELLGDAWLQEHEQFKDYYLTVFMRDSWGVVSPLLNREGLILFSKGRATAKDLVKQRLKTFNASFDEMFRKQSAWVIPEKDLREKTCGLVVQAIVPAYRSYMQNYGPLVEQDVSASKYVKYTVDGLEKMLSALFIPRPRRAGSFQIRHTNDKITSAMTGFYRSASTVK

SEQ ID NO: 56373 - protein, 221 aa, Oryza sativa; identical to SEQ ID NO: 48591

SEQ ID NO: 56374 - protein, 304 aa, Oryza sativa
MVKLATARECRAYGLGGGGRAARGRWEYINAGAYVFAAVLLAGGFGWHLSAWSATTRSGLAAAALGLLLLLAVNAHDLLAHAAGVDYSLALAAGLDSQFALVEVAVPAVHFAGTVLTLIALIFFEIQMARGYRHSLEKHGLNMLIAGPALWLLGSIQNICQVYERANGHVQILQKCVQTPLLLGSTLFLIGGIINRHDIHSQSTSRSELLGRSWGWFCVSGSLLFVAAGLLNLLKVFKMQQMDGRGLEKLRGGAQERLNREREGKVPLILEEGQRRTPAPVSGQVPPPPAGSYKEAVVSGAPAG

SEQ ID NO: 56375 - protein, 206 aa, Oryza sativa
MMISRQLVLTYLYLLIYVCLSSGVILFNKWVLSPKYFKFPFPITLTMIHMAFSGVVTFFLVRVFKVVAPVKMTFQIYATCVIPISAFFASSLWFGNTAYLYISVAFIQMLKALMPVATFIMAVLCGTDKLRWDLFLNMVLVSVGVVVSSYGEIHFNIIGTLYQVTGIFAEALRLVLTQVLLQKKGLTLNPITSLYYIAPCRYCNYI

SEQ ID NO: 56376 - protein, 210 aa, Oryza sativa
MDPEVKDSRPSRSPGEPNLFLQWGSRKRLRCVKTRDDGSPSPARTDVLRRTIPRVNRPLGGDVAPFRSPRRPSTLNRRKTEPFVSDNRHSMSPSPEKDRYYSTRGSPFPFEGNGFDFGGGMEEKGTTALPRFFISLSNKEKEEDFMAMKGCKLPQRPKKRPKLMQKCLLMVSPGAWLSDLSHERYEVREKKCARKRARGLKALCNESDSE

SEQ ID NO: 56377 - protein, 289 aa, Oryza sativa; identical to SEQ ID NO: 30999

SEQ ID NO: 56378 - protein, 676 aa, Oryza sativa
MPTQHLTSRRHAELLRHLLLDGGAAVKDLRLRRVVPLTSAPLDDSSPDPAGPAAKSGSAETTPPEAQDGRERKPVVQRSKLVHAPASFGYRRLLPFLNQLTNTNQESECPSGKDNSKVDAYAESESEAQPDPVHCSISTTKEEINISSSHLSSTKMCLSRCQRSRFVHHPSSFSYKRMLPFVTENEITSQEGHRTKIPRLVQEKQSSTDENLILTTGQHHFVMSGDSAEECKTAQVERLVEENESKSDRIHPLGGRLLQPAVSEAAHLELQVSTVEGQNLTQERVLASDAHLLSSDKGECTLKWNDVLPAGQHQPAASEDFSEESNKAGVEAVLEERKSVPDGNSVLDGRQLQTFVSKASPPEGTAEMQKATQKQAVTSDGDDDPLDSCKGGSLAKEQPLLHATELSVKDNAEGDEVHQCQSPELGTSDVCFGGPTKVVIPSVNSHNALEQCDSMASLDEPLLDVEMTCIPLDPCATGVPYSVKETPAGVLCTSDHGSTGTPLTVEETSSSVSVVHIEPMSSKVSPVRQRGSPCLEKRGLSPKKLSPKKGILKRHTRGCKGICMCLDCSTFRLRADRAFEFSRKQMQEADDIIDNLLKEVSSLRNLMEKSAGQQETKQTACQRASQVEVVARERRRQMLMELNSHCRIPGPRVKFAQYVEERMASSPSPDSPSRRR

SEQ ID NO: 56379 - protein, 364 aa, Oryza sativa
MAFATLFDSLYCPEEHLDLFHDTAADDDLHLDLHLHQPPPPPPLLDDDLPALFHALRGKEDPLRPAADDDGYGGVSAREAAVGWALRAVARLGFSALTAALAVAYLDRCFLGGALRLGDRPWMARLAAVACVALAAKVEETRVPVLLDLQLCAAERADPNEAYVFEDKTVRRMELLVLSALGWRMHPVTPLSYLQPLLGTAHAARLHHCDTALLALMPDWRWPRHRPSAWAAAALLATAGWCGGGGGDDAELLALIDAPKDEMAECAKIISEEAAAAAAGGIVIGGENKRKGAAGLYSAPASPSGVIGASACFSCDSSSSSVDSLFAALEPPGRPIKRGAAAATTADPLPADEESRDAWPPYAA

SEQ ID NO: 56380 - protein, 165 aa, Oryza sativa
MAAAAAAAARRLLSRRAPTEMAPLFPGCDYEHWLIVMDKPGGEGATKQQMIDCYIQTLAKVLGSEEEAKKKIYNVSCERYFGFGCEIDEETSNKLEGLPGVLFVLPDSYVDPEYKDYGAELFVNGEIVQRSPERQRRVEPVPQRASDRPRYNDRTRYARRRENQR

SEQ ID NO: 56381 - protein, 510 aa, Oryza sativa; identical to SEQ ID NO: 29107

SEQ ID NO: 56382 - protein, 296 aa, Oryza sativa
MGRKPDPSKPHYGGGASPRAARRTQPSPVFLGTALFVLGFVSLFTGHIVTDADWSRIRSRWRSKQVRNNEPINIWKSRYSNLYYGCSRRSVNFRSAVPENSSTGYLLIGTSGGLNQQRIGITDAVVVARILNATLVVPELDHHSFWKDDSDFSDIFDVDWFISYLSKDVTIVKRIPYEVMMSMDKLPWTMRAPRKSMPDFYIDEVLPILMRRRALQLTKFDYRLTNELDEELQKLRCRVNFHALRFTNSIQTLGEKLVRKLRSMSSRYVAVHLRLSLTCLHFLVVTMVVVIKNGGS

SEQ ID NO: 56383 - protein, 129 aa, Oryza sativa
MASEKEAALAAVPNDNPTIFDKIIKKEIPSTVVFDDEKVLAFRDINPQAPTHIVIIPKVKDGLTGLSKAEERHVEILGYLLYVAKVVAKQEGLEDGYRIVINDGPSGCQSVYHIHVHLLGGRQMNWPPG

SEQ ID NO: 56384 - protein, 720 aa, Oryza sativa
MCAARKAAARLLSPRASTHPFSAALLLRGRAARGGSLEAHLATVPHERASVLRFWVRRRRFHDARGVFDERPTRTAPVWTLTISGCARRGRYADGMRAFAEMLAEGEATPNAFVLAAVVRCCAGMGDVESGKRVHGWMLRNGVHLDVVLCNAVLDMYAKCGQFERARRVFGAMAERDAVSWNIAIGACIQSGDILGSMQLFDESPLRDTTSWNTIISGLMRSGHAADALSHLRRMAQAGVVFNHYTYSTAFVLAGMLLLPDLGRQLHGRVFIAALEGDAFVRSSLMDMYCKCGLLEAAASVFDHWSPLTRDMNFAWSTMVAGYVQNGREEEALDLFRRMLREGVAADRFTLTSVAAACANVGMVEQGRQVHGCVEKLWYKLDAPLASAIVDMYAKCGNLEDARSIFDRACTKNIAVWTSMLCSYASHGQGRIAIELFERMTAEKMTPNEITLVGVLSACSHVGLVSEGELYFKQMQEEYGIVPSIEHYNCIVDLYGRSGLLDKAKNFVEENNINHEAIVWKTLLSACRLHQHNEYAKLASEKLVQLEQCDAGSYVMLSNIYATNNKWHDTFELRVSMQERKVRKQPGRSWIHLKNTVHTFVAGDASHPQSAEIYAYLEKLVERLKEIGYTSRTDLVVHDVEDEQRETALKFHSEKLAIAFGIISTPSGTPLRIFKNLRVCEDCHEAIKYISLATGREIVVRDLYRFHHFKDASCSCEDFW

SEQ ID NO: 56385 - protein, 292 aa, Oryza sativa
MAQIIDGKAVAADIRREVAADVAALSSAHNLVPGLAVVIVGSRKDSQTYVQMKRKACAEVGIRSVDVDLAEDISEAALVAEVHRLNADPAVHGILVQLPLPKHINEEKILNEISLEKDVDGFHPLNIGKLAMKGRDPLFLPCTPKGCMELLTRSGVTINGKRAVVVGRSNIVGLPVSLLLLKADATVSIVHSRTPNPESIVREADIVIAAAGQAMMIKGDWIKPGAAVIDVGTNSISDPTRKSGYRLVGDVDFAEVSKVAGHLTPVPGGVGPMTVAMLLKNTVDGAKRGIVQ

SEQ ID NO: 56386 - protein, 43 aa, Oryza sativa
MSHDERRRRRRGGSGQRGGSGRRRAVAGLWPAAGAVFFFYFFR

SEQ ID NO: 56387 - protein, 59 aa, Oryza sativa
MTLGDKSFLAYCRLGHLLPIINYHLIVSLWHLMARTCPVEFFVYNLKEDSGAIMGLLIL

SEQ ID NO: 56388 - protein, 348 aa, Oryza sativa
MLSSSPSAAAPGIGGYQPQRGAAVFTAAQWAELEQQALIYKYLVAGVPVPGDLLLPIRPHSSAAATYSFANPAAAPFYHHHHHPSLSYYAYYGKKLDPEPWRCRRTDGKKWRCSKEAHPDSKYCERHMHRGRNRSRKPVESKTAAPAPQSQPQLSNVTTATHDTDAPLPSLTVGAKTHGLSLGGAGSSQFHVDAPSYGSKYSLGAKADVGELSFFSGASGNTRGFTIDSPTDSSWHSLPSSVPPYPMSKPRDSGLLPGAYSYSHLEPSQELGQVTIASLSQEQERRSFGGGAGGMLGNVKHENQPLRPFFDEWPGRRDSWSEMDEERSNQTSFSTTQLSISIPMPRCD

SEQ ID NO: 56389 - protein, 121 aa, Oryza sativa
MASVSSVTPTCARVRLFGSVMSATMDPSREGVLSVEGLASQMLTTARSALSKKRTEMDVLRLSTLEAPRPISSMSARNMVLRRDDQEGGFVWSFWSRCDFCCTDITAKSTALYSWSALILI

SEQ ID NO: 56390 - protein, 101 aa, Oryza sativa
MARSSTWWRCSDSAGPTPVVARRWTSWWRRTTQSLTPAGPTATTTRYTSRATTPSPTGRATSAPSGAASSTARHATTRSPSSPPARTSSPGPPPPSPPPPP

SEQ ID NO: 56391 - protein, 290 aa, Oryza sativa
MTKAAEAWEGPTAAELKAAGAEAIPGGVRVKGWVIRSHNGPILNSASLQLFEDKLQTTHLPEMVFGESFLSLQHAQTGIRLYFNALDALKAWKHEALPPVEVPAAAKWKFRSKPSDQVILDYDYTFTTPYNGSDALVQNPDSIQTSLDEPRNLCWEDSEDRIDLVALSAKEPILFYDEVILYEDELADNGISFLTVRVRVMPTGWFLLLRFWLRVDGVLMRLRDTRVYCSFGSDEAKPIVLRECCWREATFASLSAKGYPSDSAAYGDPNLIAHKLPVVMQKIQKLKLPN

SEQ ID NO: 56392 - protein, 929 aa, Oryza sativa
MMRHCRREWLLALCLISVQLLIPTGCEGVLVAASNMSPPALTPLLINQVDQLVEHAWVKCGLDKRTLEDVRRHFNYNHVLAILRRMSGQDIKDTSPDIDGGTSVLSLERRDAILNCLSKQNFMSIAGQDGLKILSADYIKALIASLRTDLAQESSTTKSIPEQAGKPVPGKTSTPKPVNKPTDSVSSPPDRSYKSAPTEKENPPTKSVAEKKKDSSGMPNAFIGLSIAGIALMAHLCLCCFMCHGTSSSDLRDDKPLLTLNPSNLSAASKSSQGNPIDVNKLGVVSLKSEAGQNGDVKLISKEGTNNVNVVHPVSSVSESTLMPPPEGANNVNMVHPEGANNMNVVHPEGANNVNMVHPEGANNVNVNMVHPVGSLSESTPMQPPVMPPPIPKLLSPPAPQAPMPPLKASPVPPPEPSPPPAPKAAPPPPPPKSTGPGPPRPPPPAMPGSSKTRPPPPLKPGAKVGAVENSNEAKTKLKPFFWDKVTANPARSMVWDHLKSGSFQFNEQLMENLFGYNSTDKSSDTKKDLSSKDATQLIRILDPKKAQNLAISLRALGVSPQEVCSAVKEGSELPSDLIQTLIRWSPSNDEELRLRLYSGELFQLGPAEQFLRVIIDIPYIFQRLDALLFMANLPEEASNVKQSFATLEVACQELRNSRLFMKLLEAVLKTGNRMNVGTFRGGAQAFRLDTLLKLSDVKGTDGKTTLLHFVVQEIIRSEGVRAERAAKEQNSGVSSVKTDDLGDKSEQTEDGYKQLGLKVISSLGDELQDVRKAAILDADQLTMSVASLGHKLMKTNEFLNMDMKSLDEDSGFHRKLTHFVQQSQTDITFLLEEEKKMRLLVKDTVDYFHGSAGKDEGLRLFVIVRDFLAMLDKVCKEVKEASKVAPVKAKAKQPSQSLQSFRDPRVNLFPAIQHLRADSSSSSSDDES

SEQ ID NO: 56393 - protein, 690 aa, Oryza sativa
MPGDAEDLPPAITKLGRHFRLTEAHIWDGWYAAGADVSHRSWHSDDIDSGGCCQTDKVQNKPTKQTDEGDLFVEDLELSNLMGSLGLPVSFSTSKEKKNAPNKVKKNGRRVSYEAANTLIDDDSRTCTGTKETESIVQLMACVEQTNPCSSSRITVGYSEVCQGDIEKMDKDIVYANEQEESGDLCSSKVLSSSKAEDNYEHETCQFHANMNNPVKADSPVRENETAEVVLKLNKEMLGQNSVDNESRFSSAEICMEGGLSTIKDQLSGETPSTSHDNKDVDHETCLSSAEPSPVDNNPAQKSDSSFYFEYGDWRVLWDPFYSRYYFYNILTQESTWYPPHGLEDFASHSNTCIPEDLDEFGSQNKSTPAQEHDQAGGDKHLDEQGQACYSELSNLSDIPDGERINQCMVTFTDEARHTDNIHHQNDSSMSEISEMNQEIGRTKKKKRVRRSKSYHSCQDLAGNISNDIAKYWAQRYSLFSLFDSGIKMDEEGWFSVTPELIAKHHASRVGAGIVIDCFTGVGGNAIHFANKCRHVIAIDIDPQKIDCAQHNATVYGVHDHIDFVRGDFIHVAPRLKGETVFMSPPWGGPDYAKVDVYDIKTMLKPCDGYSLFKLGTSIASRVVMFLPRNIDQNQLADMCLSVDPPWAVEVEKNFLNGKLKAITAYFEQQDGSDVQDASDTNPQNPEYHA

SEQ ID NO: 56394 - protein, 880 aa, Oryza sativa
MKTLSEKVDKLSHALIKETSVMNNQEETIKSEEKGAEKILKNIEDIKRSIIERDTAVKNAEDGAADMKKRADDLTKELDESEKEYQGVLAGKSNANEKKCLEDQLRDAKAAVGEAESGLKQLTTKISHSEKELKDKKAQLVSKRDEATAAENELKAREKDLETVKASMQSVNYEEGQMEALQKDRSIELDAVQKLKDKIRALSGELANVHFNYRDPVKNFDRSKVKGVVARLIKIKDSSTATALEVAAGGRLYNVVVDTETTGKQLLQNGDLKRRVTIIPLNKIQTGTIPERVRQAARRLVGAEKVTLALELVGYVEEVKNAMTYVFGSTFVCRNMESAKEVAFNREVGSTSVTLEGDIFQPSGLLTGGSRRGGGDLLRQLHELAKAEADLANHEKRLSVIEQKIVVLLPLQKKFTELKSQFELKSYDLSLFQNRVEQNEHHKLGELVKKLEQELQESKQELKAKQAQYEKSVSTVSELEKTIKTYGSEREGRLKALERKIKSLKSELQSMSKQLKAHESERERLIMEKDAVANELAMLEEQLTTSKAQIAAMTETLNRHQTKVASIKQDYDQAESELNIGRSKLKECDSQINSMAKEQQKLQQQLSDSNVERKKMENEVKRMEIEQKDCSSKVDKLVEKYSWIATEKQLFGKSGTDYDFVSCEPHKAREELENLQAQQSSLEKRVNKKVMAMFEKAEDEYNDLMSKKNIIENDKSKIKTVIEELDEKKKETLKVTWLKVNKDFGSIFSTLLPGTMAKLDPPEGGTFLDGLEVRVAFGTVWKQSLSELSGGQRSLLALSLILALLLFKPAPLYILDEVDAALDLSHTQNIGRMIKAHFPHSQFIVVSLKEGMFNNANVIFRTKFVDGVSTVTRTVPSKQR

SEQ ID NO: 56395 - protein, 60 aa, Oryza sativa
MSHQLWLLELTVSYKHQLRGWSTHGLAEVLLLTGILVSPLVHRVEQWLLYQHGHFSLACS

SEQ ID NO: 56396 - protein, 399 aa, Oryza sativa
MNGSSGSQGHNVNGGQKKVQHASPLTLNNGSKHRPLTPMRRCRGVACVVIILSTAFTLIVFIAPITTFLVRLVSVHYSRKATSVLFGMWLSLWPFLFEKINKTNVVFSGESVLPKKRVLLFANHRTEVDWMYLWDLALRKGYLGYIKYILKSSLMKLPVFSWAFHIFEFIPVERKWEIDEAIIQNKLSAFKDPRDPLWLAVFPEGTDYTEKKCIKSQEYASEHGLPILKNVLLPKTKGFLCCLQELKSSLDAVYDVTIAYKHRLPDFLDIIYGTDPSEVHIHIRTVKLCDIPTSEDEVTDWMIERFRQKDQLLSDFFMQGHFPDEGTEGDVSTPECLANFIAIVSSTGFFLYLSLFSSVWFKVYVLLSCAYLTFVTYFSIQPPQLICSSEGGTHAKKVL

SEQ ID NO: 56397 - protein, 488 aa, Oryza sativa
MVKTSANPNAKGKAAASSSGLPSPKTTPRGVRPKAFKKKAKADPEMQKVAAAEAAATAETASAPPLKPAEVSPAAAVAKENGGQRMSRKEKTKMKEGDQMKEDKKGRIKGKEKKDDKARERKGEAGFIFMCSAKTKPECFQNGVFGLPKGKIDVVEKIQPGAKLFLYDFDLKLLYGIYKAKTKGGLDLVRGAFHGKFPAQVKFKVDKDCLPLPESSFKHAIKENYNSKGKFTQELSLKQVHRLLELFKPISLPQSSIQYVKERHRRLDVFEGRLPHYVEGRRLPRHVEEMHHLRHVEERRLPYDHEERRLPYDHEERRRPRYVEDIRHPQFLKERHAITDSLHDPFRSRHVTHLPELQHAPPTYYHHVAHTFDERHHQPQVDIVYERSAPRAIVEATDREAFLARDYRVPEEIVARSDHVDELYRSYRLATRAMDLHQGPSYVTAAYENPGPAYSESIHQMPVSSTRPNVPGAPVSSLYSFAGAPAYR

SEQ ID NO: 56398 - protein, 699 aa, Oryza sativa; identical to SEQ ID NO: 55140

SEQ ID NO: 56399 - protein, 295 aa, Oryza sativa; identical to SEQ ID NO: 37625

SEQ ID NO: 56400 - protein, 802 aa, Oryza sativa
MAQSNWEADKMLDVYIYDYLLKRNLQSTAKAFMAEGKVAADPVAIDAPGGFLFEWWSVFWDIFIARTNEKHSEVAAAYLEAQQIKAREHQQQMQMQQLQLIQHRHAQLQRTNASHPTLNGPINTLNSDGILGHSTASVLAAKMYEERLKHPQSLDSEGSQLLDASRMALLKSAATNHAGQLVPGTPGNVSTTLQQIQSRNQQTMDIKSEGNMGVAQRSLPMDPSSLYGQGIIQPKPGLGGAGLNQGVSGLPLKGWPLTGIDQLRPNLGAQMQKPFLSTQSQFQLMSPQQQQQFLAQAQAQGNLSNSSNYGDLDPRRYTALTRGGLNGKDGQPAGTDGCISSPMQSSSPKVRSDQEYLIKVQQTSSQQPQEQQQQQSQQQQQQQSQQQQMQQSNRKRKQPTSSGAANSTGTGNTVGPSTNSPPSTPSTHTPGDGLGMPGNMRHVPKNLVMYGADGTGLASSSNQMDDLEPFGDVGSLEDNVESFLANDDGDARDIFAALKRSPAEPNPAASKGFTFNEVNCLRTNNSKVVCCHFSSDGKILASAGHEKKAVLWNMDTFQSQYTSEEHSLIITDVRFRPNSSQLATSSFDRTIKLWNAADPGFCLHTFVGHNVQVTSLDFHPKKTDLLCSCDGNGEIRYWNLTQLSCMRAMKGGTAQVRFQPNTGQFLAAAAETMVAIFDVETHSKKYTLQGHNTDVQSVCWDSSGEYLASVSQDLVKVWSISSGECIHEVSSNGNKFHSCVFHPSYANLLVIGGYQSLELWNMVKNQSMTIQAHEGLIAALAQSPVNGTVASASHDNSVKLWK

SEQ ID NO: 56401 - protein, 664 aa, Oryza sativa
MKISGLLTSAGINIALSVLFISLYSVLRKQPANVRVYFGRRIAEEHNRLREAFILERFVPSTGWIVKALQCTEEEILAAAGLDAVVFNRILVFSLRIFSLAAILCVFGILPLNYFGQDIHHVRIPSESLDIFTIGNVKVRSRWLWVHCVALYIISGVACILLYLEYKHIARLRLRHLTCAMPNPSHFTVLVRGIPKETKESCSNAIDDFFTKYHGSSYLFHQVVYKVGKVQKIMTGAKKAYRKFKHFTDSTIDQRCRAISYRCCLCGASSNSFQLLATGLEQNQGKSDLQDSSLKLDDQECAAAFVYFRTRYAALVASEILQTSNPMKWVTDLAPEPDDVYWSNLWLPYKQLWIRRIATLLGSIVFMLFFLIPVTFIQGLSQLEQLQQRLPFLKGILEKKYMSQLVTGYLPSVILQIFLYAVAPIMILFSTLEGPISHSERKRSACCKVLYFTVWNIFFGNVLSGTVISQLNVLSSPKDIPVQLARAIPVQATFFITYVLTSGWASLSSELMQLFGLIWNFVRKYILRMPEDTEFVPSFPYHTEVPKVLLFGLLGFTCSVLAPLILPFLLVYFFLGYIVYRNQLLNVYRTRYDTGGLYWPIAHNAVIFSLVLTQIICLGVFGLKESPVACRLHHTSYHPHSVIQSVLQKSTSPIIQNYPSTGFN

SEQ ID NO: 56402 - protein, 604 aa, Oryza sativa
MSVMARPRFEEDDEDEFFDSREVMSPASVSSPASSGRYDGPMLEVWATDPCSVHERRQRFIKSLGLSDSSPSAGGGGDRPDEEPCSRSSAAEEILPCSPTVELVSAVPSFACRGEEPGASGGGGGAEVLDCVFKNLDDGTVFVVDEMGKDGSFRSLRDRRSNRTVTAAEFERTYGSSPFICELMRRVDDSDESSAVEKALVRGRRRRRRFGWLRRLGIRGCVVDVEEDDETNSTSSSSCRSCSGKVDRVKVRLYKKRSKELSAVYRGQDIKAHEGAIVTMKFSSDGQYLATGGEDVVVRVWRVVEGERPNELDFAEDDPSCVFFTVNENSELAPVNSSEGSKSKHYKNSKVSTDPACVVIPHRTFALSQEPVHEFYGHDDAILDLSWSKNRDLLSSSMDKTVRLWQVGCNSCLKVFSHTNYVTCVQFHPTSDNYFISGCIDGLVRIWDVRRCQVVDWADTKEIITAVCYRPDGKAAVVGTITGNCRHYDASENHLELESQVALNGRKKSPLKRIIGFQYCPSDPKKLMVTSGDSQVRILDGLHVISNYKGLRSSSQVAASFTPDGDHIISASDDSSIYMWNYANQIAPVTNHVKTVWSNEHFLP

SEQ ID NO: 56403 - protein, 382 aa, Oryza sativa
MSCFSLFFKRSRTGQQQSDPYNEVFSGAENITRYSYKELAKATLNFDQSNKIGEGGFGPVYKGTLKDGTDVAVKLLSLQSRQGVKEFLNELMAISDISHENLVKLHGCCVEGRHRILVYNYLENNSLAHTLLGSRQSNIQFNWRARVNICIGVAKGLAFLHDGVRPHIVHRDIKASNILLDKDLTPKISDFGLAKLLPSDASHVSTRVAGTLGYLAPEYAIRGQVTRKSDVYSFGVLLVEIVSGRCNTDTKLPYEDQILLEKTWKCYDQGCLEKAIDSSMVDDVDVDEACRFLKVGLLCTQDISKRRPTMSMVISMLTGEMEVDKEKISKPDVIRDFRDLKLRSKATSSSSLLTSIMARSTPSSSQETTRTSITVTAISDRD

SEQ ID NO: 56404 - protein, 524 aa, Oryza sativa
MGSAADGSLANEKAPAETVGVGRYVEMEQDGGGPSTAKSRLSGLLWHGGSAYDAWFSCASNQVAQVLLTLPYSFSQLGMLSGILFQLFYGLLGSWTAYLISILYVEYRTRKEREKVDFRNHVIQWFEVLDGLLGRHWRNVGLAFNCTFLLFGSVIQLIACASNIYYINDKLDKRTWTYIFGACCATTVFIPSFHNYRIWSFLGLVMTTYTAWYLAVASLIHGQVDGVKHSGPTKMVLYFTGATNILYTFGGHAVTVEIMHAMWRPQKFKAIYLMATLYVLTLTLPSAASVYWAFGDELLTHSNALALLPRTAFRDAAVVLMLIHQFITFGFACTPLYFVWEKLIGLHDCRSLFKRAAARLPVVVPIWFLAIIFPFFGPINSAVGSLLVSFTVYIIPALAHMITFRSAHARENAVEPPPRFVGRWTGTFIINAFVVAWVLVVGFGFGGWASMTNFVRQIDTFGLFTKCYQCPPPPLPPAGAAPNATWPPFPATPFNATTAGLAPAPAPSPAHFFGRHHRHHSHGL

SEQ ID NO: 56405 - protein, 422 aa, Oryza sativa
MVRGSLGKLASRALSVAGKWQHQQLRRLNIHEYQGAELMGKYGINVPRGAAAGSVEEVKNTLKNVFPSEKEIVVKSQILAGGRGLGTFKSGLQGGVHIVKAEEAESLAAKMLGQILVTKQTGPQGKIVSKVYLCEKLSLVNEMYFAITLDRNTASPLIIACSKGGTSIEDLAEKYPDMIIKVPIDVFKGITDDDAAKVVDGLAPKTADRQSSIEQIKKLYELFCKSDCTLLEINPLAETADNKLVAADAKLNFDDNAAFRQKEIFAMRDTTQEDPREVAAAKADLNYIGLDGEIGCMVNGAGLAMATMDIIKLHGGTPANFLDVGGSASEGQVVEAFKILTSDDRVKAILVNIFGGIMKCDVIASGIVNAAKQVDLKVPVVVRLEGTNVDQGKRILKESGMTLITAEDLDDAAEKAVKASVK

SEQ ID NO: 56406 - protein, 1259 aa, Oryza sativa
MADESGSCGGGGGGGGGCEAVKKRVDQSVAFHELFGFADPLDWLLMAAGSAGAVVHGAAMPVFFLLFGELINGFGENQHSLRRMTDEVSKYSLYFVYLGLVVCASSYLEIACWMYTGERQVGALRRRYLEAVLRQDVGFFDTDARTGDVVFSVSTDTLLVQDAIGEKVGNFIHYLSTFLAGLVVGFVSAWRLALLSIAVIPGIAFAGGLYAYTLTGLTSKSRDSYANAGIIAEQAIAQVRTVYSYVGESKALNSYSEAIQNTLKLGYKAGMAKGLGIGCTYGIACMSWALVFWYAGVFIRNGQTDGGKAFTAIFSAIVGGLSLGQSFSNLGAFSKGKIAGYKLLEVIRQRPTIVQDPADGRCLDEVHGNIEFKEVAFSYPSRPDVMIFRDFSLFFPAGKTAAVVGGSGSGKSTVVALIERFYDPNQGQVLLDNVDIKTLQLKWLRDQIGLVNQEPALFATTILENILYGKPDATMAEVEAAATSANAHSFIALLPNGYNTQVGERGLQLSGGQKQRIAIARAMLKNPKILLLDEATSALDAGSENIVQEALDRLMVGRTTVVVAHRLSTIRCVDMIAVIQQGQVVETGTHDELLAKGSSGAYAALIRFQEMARNRDFRGPSTRKSRSSRLSNSLSTRSLSLRSGSLRNLSYSYSTGADGRIEMVSNADNDRKYPAPKGYFFKLLKLNAPEWPYTILGAIGSILSGFIGPTFAIVMSNMIEVFYFRDPNAMERKTREYVFIYIGTGLYAVVAYLVQHYFFSIMGENLTTRVRRMMLAAILRNDVGWFDQEENNSSLVAARLSTDAADVKSAIAERISVILQNMTSLLVSFVVGFIIEWRVAVLILVTFPLLVLANFAQQLSMKGFAGDTAKAHAKTSMIAGEGVSNIRTVAAFNAQDKVLSLFCTELRVPQMHSLRRSQISGALFGLSQLSLYASEALILWYGAHLVRHHVSTFSKVIKVFVVLVITANTVAETVSLAPEIVRGGESIRSVFAILNYRTRIDPDEPETEPVESVRGDIDFRHVDFAYPSRPDVMVFKDFSLRIRAGQSQALVGASGSGKSTVIALIERFYDPLAGKVMIDGKDIRRLNVRSLRLKIGLVQQEPVLFATSIFENIAYGKDGATEEEVIEAAKVANMHGFVSALPEGYKTPVGERGVQLSGGQKQRIAIARAVLKDPAVLLLDEATSALDAESECVLQEALERIMKGRTAVLVAHRLSTIRGVDSIAVVQDGRVVEQGSHGELVSRPDGAYSRLLQLQLHHG

SEQ ID NO: 56407 - protein, 367 aa, Oryza sativa
MDGNKDEALRSVKLAETALASGDRQRAEKFLRIAQRLDPSLPIDDMLGTPKKYDTLDGAVRQYRARSGEVGESQNLRKESVGPSNVDKGYTEENVRVVRNITKNKDYYAILGVERSCSVEEIRKAYRKLSLKVHPDKNKAPGAEDAFKLVSKAFKCLSNDQSRRTYDQTGAIEDHEFNYQYSNVMRQRTTRRQRQARSSFYGYEEDLDPDEIFRSFFYGTHDNMFQSHNAYRARGTVRQQQQQRREHPVQGGSGINLTMLVHLAGVLFFILFAFIPARHPEYSLKRTSYFSISKVTEKHGVEYFVSKQEFDQQFPRGSSSRDNLEQYVFKDYKSMLGRFCHVELQRRQWAKDYPTPHCDKLRSLSVA

SEQ ID NO: 56408 - protein, 252 aa, Oryza sativa; identical to SEQ ID NO: 51449

SEQ ID NO: 56409 - protein, 328 aa, Oryza sativa
MGTVTTADPHASFLADKGGKVFVAGHRGLVGSAILRHLVSLGFTNVVVRTHAELDLTRQSDVEAFFAAELPRYVVLAAAKVGGIHANSTFPADFIAANLQIQTNVVDAALKCGSVRKLLFLGSSCIYPKFAPQPIPENSLLSGPLEPTNEWYAVAKIAGIKMCQAYRIQHGFDAISAMPTNLYGPQDNFHPENSHVLPALIRRFHEAKASNAAEVVVWGTGSPLREFLHVDDLADAVIFLMDHYSGLEHVNVGSGSEVTIKELAELVKEVVGFQGKLVWDSSKPDGTPRKLMDSSKIQEMGWKPKVPLKEGLVETYKWYVENVISAKK

SEQ ID NO: 56410 - protein, 230 aa, Oryza sativa
MQAAARTWTWRWRWRCFHSTAAALSKPTPHIRFAVREKRADAKAALKNILLNGGPCQEGSNKQKRQQKGSGKSKLTNSSYGKNPHRKGKSAQKWKNFDEDDCSDTPYGNFGGKRSFTWYWPGEDDESGSPSGFQWRDESQSNKSRERVWNESDVDEEEPCYDNLRSHRISLGLPPLGPLELDHIKSAFRASALKWHPDKHQGASQAEAEERFKRCVEAYKALSGAFKPSD

SEQ ID NO: 56411 - protein, 201 aa, Oryza sativa
MPTDTKYRAVYGIYFLSNPCMDNLLNLNWGIILLFYLVEDLVATALWLNSKRRGVERAGSELLATIDKAYRFINGDWEQQEQRQHRPEKHCEERTARAPEHREWVTSARGGAARPTGTVVVDFNFLIIPQTGIISFAPYRELLNNTSYVLFHHEYVQICIQDNLLLNSDVKLLTAIERYLKNMICDKFILVKISRSAMLLI

SEQ ID NO: 56412 - protein, 174 aa, Oryza sativa
MFLHMRAAGEDFCEIVSENLYRFPGGVTHSFTGTAEDRDKLLSFEKMFIGINGCSLKTSENLEVLQGIPAERMMIETDSPYCDIKNTHAGIKFVKSVWPSKKKEKYEPDSTVKGRNEPCLVRQVLEVVAGCKGIADIEGLSKTLYHNTCRLFFPQDLDASADAQLESGAFIQNS

SEQ ID NO: 56413 - protein, 47 aa, Oryza sativa
MTLLVGGGTPRRGRPRIRPPHGGIQPCRAGSVSDTAWPAVMGADGGW

SEQ ID NO: 56414 - protein, 117 aa, Oryza sativa
MVTGLPSSASWQDLKDHMRRAGDVCFSDVYREAGATVGIVDYTTYEDMKYAIRKLDDSEFRNAFSRAYIRVREYDDRSRSRSRSYSRSRSYSRSTMAALIVDCIVPQICFSVTVTCG

SEQ ID NO: 56415 - protein, 657 aa, Oryza sativa
MPKKPSLSRVASETRLLFSSWEPESPLDATSGSGKDAPADQQEGDGKRGRQRSPGDEARPKRQRKTKKKNKKQLDLLEREDDPLIQLRSLKDRFKGRLKEGVASARLKCLDTLLNESRDLSQGNESKGNLLKSLIQKAELDLWQVKELETDPTSGASQSKEEASAAASDGQGDDKERGDLQAVEAYGSPPGKEKVDLQAAKDSSPTAGRKGKGKRIIGYEAQQKESNIQDVKTSSQQETRKPKRKKQKKRQRRKMEESTENLSCRSGSSPSSSHDATSTSTIEGEPEQPSFGDLASIAQDHDDKIASDVVDIKQEQESAEDILALLDMMDKDAIQEKFNYYLKQLGFESNVYDFWSETYEPEQLTALHERLAIYRIVGYELSKGRKLGKQDIAKLKEQYNPSILRKEGYFRHYEESLEWYFDLEWCKYSGFQDYQRLVLHDNVEFLEWEHYHLNYNTYEDDLAYVRYRARLANETKWIEDYLARDITQAEWRRVKDIASVQALKIARVSGGVKAQAALAGFRDHIWSIQFDFNHYKDFDGVYFKIWKRVAKRKMNFREALLEVYREDMFPVRKNGIKYELDNTQLRFKSMKEKYDAHVACLDESVPEDEVRQLIKEAVIKMKPKPHTYLDYARKKLQISMNIDLITKSTCTLLNYQT

SEQ ID NO: 56416 - protein, 427 aa, Oryza sativa
MLPQQQQQQKQQAAALMPPSMYAMPPPPPLHHHHHPLLAAAPPQQQIEPILTGNLPPGFDTSTCRSVYVGNVHVQVTEALLREVFQSTGLVEGCKLIRKEKSSYGFVDYYDRRSAALSILTLNGKQIFGQLIRVNWAYASGQREDTTDHFNIFVGDLSPEVTDSALFAFFSGYSSCSDARVMWDQKTGRSRGYGFVSFRNQQDAQSAINDLNGQWLGSRQIRCNWATKGASNGEQQTSDSKNVADLTNNLTEDGKEKANEDAPENNPQYRTVYVGNLAHEVTQDVLHRLFHALGAGAIEEVRIQLGKGFGFVRYSNHAEAALAIQMGNGRILGGKPIKCSWGNKPTPPGTTSAPLPPPAAPSVTAADLLEYQRSLALSKMVSSQALMQAQAQQHLKQAMGMGAGVSQAMYDASFPNVGPSQQQLMYY

SEQ ID NO: 56417 - protein, 333 aa, Oryza sativa
MLFVDASEYGNSSCLILGVRARLALQVMQDELQKLALKVNHHEENIRFLKSELNAVEDSCADLGIKIGNYYSSMAAIANNDTSVEEAEQRTIQSILKQDETAAGIICQLKIRHYQHASKLPLMKDVLGVVATLGKINNDNLSRVLSEYLGLDNMLGVVCKTYDGVEGLETYDKEGMVDKTSGIHGLGRTIGKFLDGRFTVFCLENIKPFSGDFMIDDPQRKLLLHKPRLPSGEFPPGFLGFAVNMIHLDQANLSCLTAGGHGLRETLFYSLFSQLQVYKTRAELRNAIPLINDGAVSLDGSILRPNGSFCLGNRYAIIWIYPLTSHHILLFDH

SEQ ID NO: 56418 - protein, 93 aa, Oryza sativa
MEIGLLIEDIGVQHNSRRRNVPPQDAEFGRCSVHTIDGTILRCVPENANGGSTRNGKGEHFGKGKAWCSRSLVAQRYRMEAVLLPWDEMLRST

SEQ ID NO: 56419 - protein, 466 aa, Oryza sativa
MAASPTGSSSSAPAAAAAAAAEATDGPTLSVVSKRLRALRKKHNRILQMEESLAGGRKLNREQEGVLRSKPAVVALIDELERMRAPLAAALAEELSSRPAPSSSAAPPPPASSSAAGAADSSVVEDLLALIYFGTLFDLKPQTEFVATMVARAQERDCCITYDYVTEDAADLLHQSDLDKVSALAALAASRPAAAVGVSHRDALQSCAQHARLWLRRADEPIHPESSITYAAVRAKLDKIMASDYYTAQPEMPEMGAAVDLSAAVQESMVVSPEAPAVEESQAEGHKDEKEASEATEIYNDNQPNVADAQNVEDEAPVNPSEEFSAAEVEQEKFEADVEEQERNADQQFTSRRPYQNQRGGGGRGGGRRGYQNGGRGGRGGRGMGGGGYQNGRSGGGGGGYQNGRGGGEGGGYYYNEPGYYQQRGYSNRGRGGRSGGGNSYYNNQGGGSQGGGHAHPGRVELGANA

SEQ ID NO: 56420 - protein, 450 aa, Oryza sativa
MVRRKSKSPAVSPTTLGDLPDKLLEHILVRVASPVWLTRAAATCKRWRRIVANDNFPFHMDRRLPNPVAGHYHYSRRRADGRGRSSRLITFVPSSSAVALGVDARRHFSLDFLPGGRSSWDLVDSHSSILLLAATSSTRRRGHRHGLFPDLVVCEPVTRRYKLIPRMEEMKHQRCLGVFLQNYPTSSTSNRSSIMSSLRVICVVYIEYSGVSDGMGTVRACVFDPNGSNSWKPRPRSACWYMFKPSWNMAKHGIHLRGSEHARLLGHAAGAVFWAVGGDDTLLVLDKWRTEFEVLRLPGSVRASGLRAIVDGGNGDNDGKLRVVCLDEENVVRVFATWRGQHSNGEWVLQKSLRLEESTMGLAGYKAGRGGAAMVVAAATAGSVVLAPVEGMTWMFSVDLETMEIAECKEVSVAVYPCELPWRPTLRACVTRCERRGRGRCSHICICDDA

SEQ ID NO: 56421 - protein, 249 aa, Oryza sativa
MSSIGTGYDLSVTTFSPDGRVFQVEYATKAVDNSGTVVGIKCKDGIVLGVEKLVTSKMMLEGSNRRIHSVHWHSGLAVAGLAADGRQIVSRAKSEAASYEKVYGEPISVKELADRVASYVHLCTLYWWLRPFGCGVILGGYDRDGPQLYMIEPSGVSYKYFGAALGKGRQAAKTEIEKLKLSELTCREGIVEVAKIIYGVHDEAKDKAFELELSWICDESNRQHQKVPADLLEQAKVAAQAALEEMDAD

SEQ ID NO: 56422 - protein, 190 aa, Oryza sativa; identical to SEQ ID NO: 33947

SEQ ID NO: 56423 - protein, 424 aa, Oryza sativa
MDMPPTPLPPETANTSPAPNGATAGIRVENCYVFKSRLQEYAQKTGLQTPEYHTFKEGPSHEPVFKSTVVINNTSYDSLPGFFNRKAAEQSAAEVALMEIVKSIPANANIPAVQETGLCKNLLQEYAQKMNYAIPSYICTKSASGLAPFICTVEIGGIQYIGAAARTKKDAEIKAARTALLAIQGQSEGSANGATKYIVVPGKRVGKEVEKRPIETPKPLKVKKGGFKKKWNKRKFMKKDGQAVDVEKDEARVAGDAHDSDVLMQPTVITQEASCGTLFLQPCEEAKRVEAEPPRDIEMVQPDKENQHSDAALVQPDDEARVEQEPSRDISVVQPNEEAISGKQEPPIDAAILQPKEEASSVKQEPFIDTAMLQACKEAGSVELGPARDTVISQLNEQDRAVKQEPAGDIVVPQPDVHARVVKE

SEQ ID NO: 56424 - protein, 675 aa, Oryza sativa
MAAYEPKNILITGAAGFIASHVANRLVRNYPHYKIVVLDKLDYCSSLSNLNPSRPSPNFKFVKGDIASADLVNYLLTTESIDTIMHFAAQTHVDNSFGNSFEFTKNNIYGTHVLLEACKVTGQIRRFIHVSTDEVYGETDEDAVVGNHEASQLLPTNPYSATKAGAEMLVMAYGRSYGLPVITTRGNNVYGPNQFPEKLIPKFILLAMRGLPLPIHGDGSNVRSYLYCEDVAEAFEVVLHKGEVGHVYNIGTVKERRVIDVAKDICKLFGLDTEKVIRFVENRPFNDQRYFLDDQKLKKLRWAERTLWEEGLKKTIEWYTNNPDYWGDVAGALLPHPRMLMTPGVERHNWTDEIKSLSTSPDEAKESSTAVPAATAKSTSSAPQKASYKFLIYGRTGWIGGLLGKICEKQGIPYEYGKGRLEERSQLLQDIRNVKPTHVFNAAGVTGRPNVDWCETHKQDTIRTNVVGTLNLADVCREQGLLMINYATGCIFEYDAKHPEGSGIGFKEEDKPNFTGSYYSKTKAMVEELLQEYDNVCTLRVRMPISSDLSNPRNFITKIARYDKVVIIPNSMTILDELLPISIEMAKRDCRGIWNFTNPGVVSHNEILEMYKKYLNPDFKWTNFTLEEQAKVIVAPRSNNEMDASKLKSEFPELLSIKDSLVKYVFEPNRKVPAN

SEQ ID NO: 56425 - protein, 172 aa, Oryza sativa
MFLIFPIRWGMWTAENDSCCLTMSSLGQTVWPESKCLSLGSTKDFLGKTLTFVCLMSSVSKWISFSISFGSSVTSVSRRLKYLSEYMPQMFFRWRLFKPLQLSKSSTLSRHSKEDDGRDLRKVRISSIGSDRDICNFVLKRIERWRASSRGAKTVTTKVVSYPPDTRSVMTS

SEQ ID NO: 56426 - protein, 698 aa, Oryza sativa
MEGCQLVARCSSSSSSSRMEVEEEAFFDTREELLPPSPAAALPWSGGLDSVRQRRERFMRSMGLERSPSLRQADFADVVGDVEEEGEVAAEAEIGRWSSQSDENECSMSSWSTEETTSYDDGASDDNSVSGSGKASRSFSSLSFIQRLMSRNGKPSGAPKTIDRRRNGWLRRLGVSACVVDSGAADEASTSSSDSEQIGAGRYERIKVHSYRKRSKELSAVYQGQVIKAHDGAILTMKFSPDGQLLATGGEDGVVRVWAVMQSEDCKIPLDDPSCVYLKARRKYGLAPVNAESEKKSKINGLKKSDSACIVVPTMVFQISEEPVHEFRGHSGDVLDLSWSSDKHLLSASTDKTVRMWEIGYANCIRVYPHSNFVTCVQFNLADENLFISGSIDGKIRVWDITRSSVVDWVDIRDIVTAVCYRPGGKGVVVGTITGNCRFYEISDNLLKLETQIALNGKKKSSLKRITGFQFCPSNPSKLMVTSADSKIRILDGTNVIQNYSGLRSGSCQLSATFTPEGQHIISASEDSNVYVWSHENQYECACKQAKTTQTSEHFRSNNAAIAIPWNGTKPRSPVPLSSQILPPQGDTFWSMSKAIKYNSSLCGKDSSIKKIVSTPAAPGIFNLNQEFFIESSCKSSATWPEEMLPSTTASVNLDESQFKLLRNCFQGTSNSWGQVIVTAGWDGRIRYFQNFGLPVHQ

SEQ ID NO: 56427 - protein, 404 aa, Oryza sativa
MKLHFVLRFLFGPVPVYFSALAILILLTNAQYFGLVGVTVPRATKLASSAPVVSVMKYCDIFRGEWVPDSDAPYYNHKTCYMIQEHQNCLKYGRPDLEFLKWRWRPSGCELPRFDPVQFLQFNRHKSLAFVGDSLARNHMQSLLCLLSQVAYPKDMSANPTTQNKVYHYRGYNFTVSMFWSPFLVKAREPDHDGPAHTGHWGLYLDEPDQSWVSEISRFDYVLVSAANWFSRPSLFYEKRRLVGCSFCSRQYGVPDLTLYYSQRRAWRVALKAINDLESLRGRVIVRMLSPMSHFENGTWDQGGNCKRTQPLRSNETVMEGRDLHFYTAQMEEYRAAEKVAEAKGRRMMLMDATAAMLMRPDGHPSRYGHLPNQKVQLYNDCIHWCLPGPIDIWNDMLFQMLLV

SEQ ID NO: 56428 - protein, 590 aa, Oryza sativa
MGRSSSATAAGSKKRRSKTGALTLGEVKTLGEELLSSRANLNHAPTLLALLSPSAPLDLALEALISLQSFFVPLLPSIPSAAATAAAAAGDADPELVFRSWLRKRFDELVAALVELTVSPHSDDAIRDLALDALMDFVKLGKDGRFQSAIYHKFIHNLIHATDSIDPLLELLGPKYFIYTDVCYFTYTSLDKIASSIGNKATGSEKSVLHSGDDGPEDRGTIYVRNIYNTLAHIPALDFQESKFNMWSTVGLSSKGEKNSSEDCSATYINKKLKSKFSKAWISFLKLPLPLDVYKEVLATIHKNVIPSMSNPAILCDFLTRSYDIGGVISVMALSGLFILMTQHGLEYPKFYDKLYALLTPAVFMAKHRAVFLQLLDACLKSSYLPAYLAAAFAKRLSRLTLSVPPAGALIIIALIHNLLRRHPSINFLVHWEIDANDSEIFNEASQRKKVGADPFNNEETDPAKSGAMRSSLWEIDTLRHHYSPAVSRFVASLENDLTVRAKTTEMKITDFSSGSYATVFRDEVRRRIKQVPLAFYRTTPTCLFQESDFPGWTFRDQFKNMAETSVEGNGISTVDISNSSPAKRLRMET

SEQ ID NO: 56429 - protein, 304 aa, Oryza sativa
MQPLFAKIIVHTLLGSSSGIRTLEISENNIAGWLKTMDKRFACFSSALESNISLNSLTLLNLRGNNLNKGDIEDLCKILVKMPNLRDLDISDNPIMDEGIRLLICFISRTLRKEKSLSRLRAENCDLTNIGVTELLECLSSVSEPLNLLSIADNHLGSSVAVALAKFLGSGVRELNIEDIGFGPLGFQILEEALPADVALSHINVSKNRGGIRAARFVSRLIKQAPGLVSVNAGSNLLPPESMEVICDVLKQKNTCNLERLDLMGNMHLSDAAFPAALEFRKHGKQILIVPSQPGACAPYDDDP

SEQ ID NO: 56430 - protein, 420 aa, Oryza sativa
MTKDEDFKLVKIQTHVLRVNIHCDGCKHKVKKLLQKIEGVYSVALDVDNHKVTVTGNVDSDTLIRKLTRGGKHAELWSQQKGGSNQGHRGSNNQQKQQQQQGQQQHGQQHQKQGANPSKDGNKNNNILKDQGKQGGVGGLIQGLKAFKNQHSKNQLPELDSEDDDLYDDEDDEFDDDYEDDLRFLGDKMSQLGFLRQQAAAAAAANVKNKNANTATVNNHHNNVNGKKGGGGGGSAGGGNHHQNNHHQNQKNPNVINMAAANAKMANGAQKNTGAINGMMGLNHGLGTAGATPGFQGYTGFNHPSYASAGYGGLQQQHLQQQQQSNNLMASMQGYHHHPAATAAMMNNLRGLNNNMMMMHQPQQQPQMMYHRSPQISPYTAYYNPYSYYYHPGAAGYHPASNGDVETMFSDENTKGCVVM

SEQ ID NO: 56431 - protein, 310 aa, Oryza sativa
MDVVKAAQLSGRTLEKVVVHPLVLLSIVDHYNRVARDTRKRVVGVLLGTSSRGSVDVTNSYAVPFEEDDKDPRIWFLDHNYHESMFSMFKRINAKEHVVGWYSTGPKLRENDLDIHALFNNYVPNPVLVIIDVQPKELGIPTKAYYAAEEVKENATQKSQKVFVHVPSEIAAHEVEEIGVEHLLRDVKDTTISTLATEVTSKLAALKGLDARLREIRGYLDLVIEGKLPLNHEILYHLQDVFNLLPNLNVNELIKAFAVKTNDMMLVIYLSSLIRSVIALHNLINNKMLNKEHEKAEDSKPTAIPSAAGS

SEQ ID NO: 56432 - protein, 342 aa, Oryza sativa
MANPSRHSRSGDGNGWASPERTMVWRTELKKKQMKQVVVGVVYYLCRQDGQLDHPHFVHVHVPSDSDSDHPRPRLHLRDFIARLSDLRGAAMPAAYSWSAKTTYRRNAGYVWQDLTADDLIPAPSTNHEEYVLKGSPLLHHNSNTPAQHRRCMTSFDLADYHRTTDPVPVPAAAQQSLIGIDEISPPPSSSSPDDTTTQLVTLKQKQQEEDGCTPQQQAATTPAGRMRTSAMLMKLISCGASSIKELQGQAQSQRCRATAWHNNKPDIMDHRDYFSGSLLDNNTTTHPIDLTLRRSSSCNAHRGQSSRLGVVDQDGVPRRQQLHAKSTAARMDSPETDQIRS

SEQ ID NO: 56433 - protein, 355 aa, Oryza sativa
MAAAAATAPAAAVVRRMKLGSQGMEVSAQGLGCMGMSAVYGERKPEADMVALVRHAVAAGVTFLDTSDVYGPHTNEVLVGKAVAAAAATEEEVQVQVATKFGITPAWEVRGDPAYVRAACEGSLRRLGVGCIDLYYQHRIDSTVPVEITMGELKKLVEEGKIKYIGLSEASASTIRRAHVVHPITAVQIEWSLWSRDVEEDIVPTCRELGIGIVAYSPLGRGFFSSGAKLVDELPDDDFRKSLPRFQPENLEKNAAIFEKVNAMAARKGCTSSQLALAWVHHQGSDVCPIPGTTKIHNFDQNVGALSVKLTPDEMSELESYASADVVQGDRYHGTFLNTWKNSETPPLSSWRSGN

SEQ ID NO: 56434 - protein, 600 aa, Oryza sativa
MDLSRPESSDLSLGFHSLGHARGHAVTGPLRLFDDMEDAKPEKSVGGGGGGGGGGGEEEDGEEGGDQHFSLLGHALCVKRPRRALYGGGGGGGAGGGGGGGGEASSCSSSSSSLHPAKRQATAERGADLEARRGAVRAWGNQALAEADPDVHALMELERDRQVRGIELIASENFVCRAVLEALGSHLTNKYSEGHPGARYYGGNQHIDGIERLCHERALAAFGLDPACWGVNVQPYSCTSANLAVYTGLLLPKDRIMGLEPPSGGHVSHGYYTPSGKKVSGASIFFESLSYKVNPQTGYIDYDKLEERAMDFHPKILICGGSSYPREWDFARMRLIADKCGAVLMCDMAHISGLVAAKECRSPFDYCDVVTSTTHKNLRGPRGGIIFFRRGKNLRRRTGSFSQADENDYDFEDRINFAVFPSMQGGPHNNHIAALAITLKQVATPEYKAYIIQVKKNAQALASALLRRKCRLVTGGTDNHLVLWDLRNLGLTGKNFEKVCEACHISINKMPIYGDNGSISPGGVRIGTPAMTTRGCLEDDFEVIADFLIRATQIASNLMKEHGKMQKEFLRGLQNNKDIIELRNQVENFASQFAMPGFDV

SEQ ID NO: 56435 - protein, 49 aa, Oryza sativa
MAALRVPLRAILATPRAAGPRLLLPLHAHLLVSSLDIDRLAPSRPVFKL

SEQ ID NO: 56436 - protein, 269 aa, Oryza sativa; identical to SEQ ID NO: 40054

SEQ ID NO: 56437 - protein, 235 aa, Oryza sativa
MQPTLPEDAVKCSDLTLDSSSFLLRNVLGKSSATVYGVALLASGQSSTITGTYAGQYVMQGFLDIKMKQWLRNLMTRSIAIVPSLIVSIIGGSSGAGRLIVIASMILSFELPFALIPLLKFSSSSNKMGENKNSIYIVGFSWVLGFVIIGINIYFLSTKLVGWILHNALPTFANVLIGIVLFPLMLLYVVAVIYLTFRKDTVKFVSRRELQAGDDTEKAQVATCVADEHSKEPPV

SEQ ID NO: 56438 - protein, 348 aa, Oryza sativa
MALRRMGIILVLLAIATLLSPAVSARFISLPTDHLPITTPPLADGLGFDLYSDSCPQLETTVRSAVQAALQQEIALAAGLLRIFFHDCFPQGCDASLLLTGANSEQQLPPNLTLQPRALQLIEDIRAQVHAACGPTVSCADITALATRDAIVASGGLPYDVPLGRLDSFAPAPSDAVFQLPQPTSDVSTLLSAFQTRNLDNVDLVALSGGHSIGRARCSSFSNRFREDDDFARRLAANCSNDGSRLQELDVTTPDVFDNKYYSNLVAGQGVFTSDQGLTGDWRTSWVVNGFAGNHWWFYGQFGSSMVKLGQLQGPSGNVGEIRRNSCFVPNSQIILAAAGDDGFTASA

SEQ ID NO: 56439 - protein, 804 aa, Oryza sativa
MKGAMPPRPFMMPGPGGPMPPPQQFGLVETRPPLAAVLRPRFNIPGLHPSAAAASAAGKIASTYDLVESMRFLYVHVVKAKDLPAVSAAGTIDPFVEVKLGNFKGTTPVLGGNHNPSWKQVFAFSATHLQAHVLEVAVKAKDLAGGDDLIGRVGFDLSEVPIRVPPDSPLAPQWYRLENKRGEKTRGEIMLSVWLGTQADEAFPDAWHSDAHAAAGPGAVASTRAKVYFSPKLVYLRVAAIGAQDLVPLDASRPANFCVKLQLAGQVRRTRPGAPPGTLNPIWNEEFMFVVSEPFDEPLFVTVEDRVGPGRDEPLGRIMLPLNAAMPRHDHFGKPVEPRWYSLARPSDDPDKKEGKFASKIQLRMSLDFGYHVLDESTYYSSDLQPSSKHTRKPSIGILELGILGARNLIPMKGKDGRTTDAYCVAKYGPKWVRTRTILNTLNPQWNEQYTWEVFDPCTVITVVVFDNNQIGKNGDARDESIGKVRIRLSTLETDRVYTHFYPLLALKPSGLKKTGELHLAVRFTCTAWVNMIALYGRPLLPKMHYTQPISVMQLDYLRHQAMQIVAARLSRAEPPLRREVVEYMLDVGSHMFSLRRSKANFYRITSLFCGFAATAKWYDGIRSWRNPITTVLVHMLFLILICYPELILPTIFLYMFMIGLWNYRYKPRHPPYMDTKLCHAEFTNPDELDEEFDSFPSSRPADIVRMRYDRLRSVGGRVQTVVGDLATQGERAHALLSWRDPRATAIFIFLSLVVAIVLYVTPFQVLLVIAMLYLLRHPRFRSRMPSVPFNFYRRLPAKSDMLL

SEQ ID NO: 56440 - protein, 938 aa, Oryza sativa
MKFLMNCISRYQMSLDIQQASSDGCNLTFKKYFTSKFSTLVKELARCIDTFFDHLPTDSLGRNLDRMMFAKSLLDKLQQLLCADDVSDELLFTIFKPSDEPIDSFDSHDQTDDATVDLHDHDISLDDPLEIKSLCIKTLMDLSKMRLPCEDNESSIRDLCLKRAKLVFCTASSSFELFRLQNVMPISILVIDEAAQLKECEALVPLLLPGIEHILLIGDENQLSSLVKSKIAKDADFGRSLYERLCTMGYRKHLLEVQYRMHPGINKFPNANFYDNRISDGPSVQQEDYMKSYLPGPIYGAYSFIHIENDMEMLDELGQSSKNMVEVAVATNIVERLAKECSEKRQRTSLGVISPYTAQVIALQERLGKQFKNHEFLSVTVKSIDGFQGGEEDIILISTVRSNKNGKVGFLSDAGRINVALTRAKYCLWILGNGATLLASNSIWAELVHDSKRRGCFFNALDDKNLAEIIMHATKEGEQRNQREQRSAHNANRWSSGSSRHDIIAAGNSRPMRWSHFPGSGNTRRSNGHDSRLNVCHTKEDMHRTHFQQRKSYSGDYSQVAPPNQYWHNGNRPSRGSYGYLEVFREHPNHHSGQDSRTRSYHETMCSTPQTGNGRFPYSGSIQREKSQRQTSILGERQPLGGDGNKGFQDGTSGYPCRRNSSQIRPNTYEAGAPELQSMNKHREFSSYPQQAPYRTFGGRGRGRPTYHGRGRGGWYERTNNHWMEEPHQVQNATCNMPVTMQQGMKRNWCEAEASDSPQQVNAKIRSESADRPHLHDEHGGYGTASHQLPAIKPEDVSEQQCEMKTDSYEAEASESPNDSTRVRPESVEQPYCQAQGDSSGAASQEPVIPEQRGMSGDLCEAVCHQSNTSGSPNRGSTEVTLEGAEQPHCQAQPDGSGVASNEAPVPEQRWTEGDLGEAAEPGQGNAENKAESAEADS

SEQ ID NO: 56441 - protein, 439 aa, Oryza sativa
MLRLRRLTGAVSGGLARYLSTRAASPARPPWALLQLSKMDRSGASSQPGASLHADYPPCVSYLTFAASFVDPRLRHDAESEMFGTVSTDVRATSGDGLVPVRFYDSRNHLPTVGSRGGEPMREWALDGVDRDPEVTRFICNPLSGEMYRLPDLNGTKKTSRYLHFGLLTQSDAGQGPPARYAVAELDGNREEDGQGWLVRRFLSDSGEWDKLVGMPSPLPARRTVDIDHEVVAFGDRLWWVDASWGAVTIDPFSDRPELRFVELPKESVLPDLDDVVMLRELGKYRRMGVSEGKLRYVEVSLGKQFLIRSFSLADDDEGGDSWTLEHEVAFGPIWKDEHHASVPLGGMPRIGAIDPLNANIVHLIVGDQMLSIDMIKERAIDSSRLGCADFPLLPCVLPPWLESSQIPEGIHWSKKAKMKSNTPSYSDMSVHVDIELKK

SEQ ID NO: 56442 - protein, 381 aa, Oryza sativa
MIEGRRHSVDIPISRALLAVMRSRSLRDPETNSLAKFSAKKTIWEGCSLEEDDLEESNYGRHSFSYNMYDHLQRRREEFGDSARSGRLVNSPINIIKANARVKAALHNQTCSSVISGMSRATKDRASSLMIEGEQLGRREGATFQESARSLLQKYRPKAFSELAGQNVVAQSLSSAVLKGKLAPIYLFHGPHGIGKTSAARIFAASLNCHSSGGNQPCGHCEECMAIFSGNSSSVIEIDASKLDCKSRVAALLRNACEVPASSHFKVLIVDDCQHMDKEGWYSVYSSLEGIPDSSIFVMITSDIDKLPSNSVGWCQSYRFCKVDEAEIALRLSRICINEGMEFEAEALELIARKANGSIRDAVQMLDQLTLLGKRISKSVT

SEQ ID NO: 56443 - protein, 336 aa, Oryza sativa; identical to SEQ ID NO: 48849

SEQ ID NO: 56444 - protein, 688 aa, Oryza sativa
MSAPPAPPHPQPEELEVAEEPPAAAGGVGNDKVLAAAQHIVKSLATSKNAADDMIRILSGFDHRFSSITADLFPSPLPSSGAGPTPPPPPPPRGAFEAAERLIRQWDATSELLVFEGPEGDVADYLEAVDVAVDQLLSGVGAAAADAEAEAAGVVVQLAMARMEGELRHLMVRHAVPLDASGLFCSLRRLSLESMDDLDTSSEFDPITPHSLEGGPDTARNASLVGNPFDDQVFDLVRPEAIDDLRSIAQRMDRAGYASELEQVYCGVRRDLLDECLAVLGVERLSIDEVQRMEWKLLNDKMKKWVHGVKTVVRSLLTGERRICDQVLAVSDELRDECFVESTKGCIMQILNFGDAVAVCSRSPEKLSRILDMYEALAEVIPELKELFFGNYGNDVICDLEGVLERLGDAVKGTLLEFGKVLQQESSRRPMMAGEIHPMTRYVMNYLRLLVVYSDTLDKLLGDDSAGDVDHSDTHRGGDDEEEYLESLSPLGRHLVKLISYLEANLEEKSKLYEDGALQCIFSMNNILYIVQKVKDSELGRILGDHWIRRRRGKIRQNSKNYLRISWTKVLSFLKDDAHGGRSGSGSGSGNSSRIKEKFKNFNLAFDEIYRSQTLWKVPDPQLREELKISISENVIPAYRALLGRYGSLVDSGRNSGRYIKYTPEDLENQLSDLFEGSLGPANHSRRR

SEQ ID NO: 56445 - protein, 816 aa, Oryza sativa
MLGGLKDKLTGKNGNKIKGLAVLMSRKLLDPRDFTASLLDNVHEVFGNSITCQLVSATVADQNNEGRGIVGSEANLEQGLTDLPSVSQGESKLTVRFNWEMDKHGVPGAIIIKNHHSTKFFLKTITLHDVPGCDTIVFVANSWIYPVGKYHYNRIFFANNSYLPSQMPEALRPYREDELRYLRGEDRQGPYQEHDRIYRYDVYNDLGEPDRDNPRPVLGGSQKHPYPRRGRTGRIPTKKDPNSESRLSLLEQIYVPSDERFAHLKMSDFAGYSIKAIVQGILPAIRTYVDLTPGEFDSFEDILKLYRGGLKLPSIPALEELRKSFPVQLIKDLLPVGGSYLLKFPKPDIIKENEVAWRTDEEFAREILAGLNPMVIRRLTEFPPKSTLDPSKYGDQTSTITPAHIEKNLEGLSVQQALDSNRLYILDHHDHFMPFLIDINSLDGIFTYATRTLLFLRDDDTLKPLAIELSLPHIEGNLTSAKSKVHTPASSGIESWVWQLAKAYVAVNDSGWHQLISHWLNTHAVMEPFVIATNRQLSVTHPVYKLLQPHYRDTMTINALARQTLINGGGIFEQTVFPGKHALAMSSAVYKNWNFTEQGLPDDLIKRGIAIKDPSSPSKVKLLIKDYPYATDGLAIWQAIEQWVTEYCAIYYPNDGVLQGDVELQAWWKEVREVGHGDLKDADWWPKMQSLPELTKACTTIIWIASALHAAVNFGAVPIRGLSSKPSDHKPAADARAGFQGVHRAGARTQRSSSSAPSPANSKPFSVSRSLRFYQSTQRMRSILGSVTRQSGHQTPRHWKHSRGSAGSWWRLRAKC

SEQ ID NO: 56446 - protein, 612 aa, Oryza sativa
MPHPRPRGGGDRLGALPDEALQHVLPFLPLPEAVRTGALARRWRHLWKSMPVLRITGEGRVLNRSGVRRLNRFVNHLLLLRDRSARLDACEINLGTFRSQDDPQINLWIRHVLLCEARDLRVHLSIDNNSFEMENLALVSRHLTRLELSNVVLKDHFLNFSSCPALEELVTRNCHIEAEEILSESLKWLTAVDCVFSSYPRTRISLPSLVALELTEPWGSTPVLESMPSLLTASIKLTDCDDHCGKEEFGGSCDDNACDNCGANGGSSGDCVLLDGLSEAKSLELIAKPRVFIFRSDLMWCPTFGKLKTLLLNEWSVAIDLVELICFLQHTPVLEKLTLQLCEGPVNWMENEGSYDPTENPFASKQLKVVEVKFEKFDLRVHKIIMIFSTYGVNIEQIYIQRSVVHSEEPTDDSGAGPSRVRTPPISTSENAQLKITIDQMLGQQQELLAQQQQQQHFLSQLQRRQQILCDITAQLSKYAAPPISQRPPQANLYPSDMSSKLIFDFYYGEGNVRCGQNGVDLSEFKCMARGIARAAKRSFEAVCNWLIRGFRIDPQTHGLTIYAMVSREPIGYFWELMPIDCTDIWRRYVEMACERCWPLAILVHVYEKGNT

SEQ ID NO: 56447 - protein, 379 aa, Oryza sativa
MIGPAGLDSLHGLRRREFMATLHHLRARSGEPVNVGAQMFLTVMNVVTGALWGGNVGSESERTTVGKEFRELVADITELLGAPNVSDFFPALAPLDIQGIRNKSDLLEDRFDDIFARIIQKRTESDHAAAAGETASDFLEYMLKLEKEGGDGKTAFTMTNVKALLMDMVIGGTETTSNTVEWGMAEMLQNRGTLRKVREELDAVVGRDGVVEESHLPKLHYLNLVVKETLRLHPALPLMVPHCPGEDATVGGHRVPAGARVFVNVWAIQRDPAVWKDPEHFIPERFLPADGGGGRRLDFTGSEQEYMPFGSGRRICAGVAMAERMVAYSLAMLVQAFDWELPAGERLDLAERFGIVMKKATPLVAVPTPRLSNPQLYSA

SEQ ID NO: 56448 - protein, 400 aa, Oryza sativa
MASRMALRPNDVTLRLTPPLAAAARRNRRAAAGGVRVYAVASGAVSTKVENKKPFAPPREVHVQVTHSMPPQKIEIFKSLDDWARDNILSHLKPVEKCWQPQDFLPDPASDGFHDEVKELRERAKEIPDDYFVCLVGDMITEEALPTYQTMLNTLDGVRDETGASPTAWAVWTRAWTAEENRHGDLLNKYLYLTGRVDMRQIEKTIQYLIGSGMDPRTENNPYLGFIYTSFQERATFISHGNTARHAKDFGDLKLAQICGIIASDEKRHEAAYTKIVEKLFEIDPDGTVLAFADMMKKKISMPAHLMFDGEDDKLFEHFSMVAQRLGVYTAKDYADILEFLVSRWKISDLTGLSSEGNKAQDYLCTLAARIRRLDERAQSRAKKAGTLPFSWVYGREVQL

SEQ ID NO: 56449 - protein, 301 aa, Oryza sativa
MSSNKIELDHKDMVHDSAIDYYGKSLATASSDSTVQISSIGGASAPSQLLATLSGHYGPVWRVAWAHPKFGSILASCGYDGRVVVWKEGAAGQWSQAHVFDNHKSSLNSIAWAPYELGLCLACGSSDGSISVMTMRPDGGWDSTTIEQAHPVGVMAVSWAPATALGSIVGSGELVQKLVSGGFDCVVKVWAFVNGSWKLDSVLPSDMHTDCVRDVSWAPVLGLAKFTIASASEDGKVVIWTKGKEGDKWEGKVMHDFEAPAWRVSWSLTGNILSVAAGSGDITLWKEASDGQWEKVTKVEP

SEQ ID NO: 56450 - protein, 397 aa, Oryza sativa; identical to SEQ ID NO: 33191

SEQ ID NO: 56451 - protein, 408 aa, Oryza sativa
MVRVDDLAGTNTTASTMMDIHSLIMSLNFTQIEIKTANFLNSWGDGVLVMVSGLVQTKEYSHQRKFIQMFFLAPQEKGYFVLNDYFHFVDEEQVQPAPVIAQDNFETNMASNSVVEPEYIHEEENQSAVPITSEESDAVENYTYSEPPQQVVSQSDNWGDEPLPEEPISSFTNGMAMAPEEPVQSPPVPPPHVEEPVGEPVKKTYASILRTAKAPLVFPVAQPAPTRPHQATETNQAAQHSVMTSSVATEKPKTDVYGEFAVQDDEESKSVYVGNVPSSVSEADLENEFKKFGRLIPDGVAIRSRKETGGYYAFVEFEELSGVHNALKASPIEINGRQIYVEERKPNSGIRGGRRGGRGRFGGGGRGYARGGGDNEYAGNRGSGRPSNGYQRVPHHERGILGSHNARN

SEQ ID NO: 56452 - protein, 192 aa, Oryza sativa
MVDYDYLVVALGATVNTFNTPGVMENCYFLKEVEDAQKIRRNVIDCFEKASLPNISEEEKRKILHFVIIGGGPTGVEYAAEMHDFLVEDLVKLYPAIQDFVKITIIQSGEHILNMFDQRIATFAEMKFQRDGIEVNTGFRVVKVSDDLITMKSKSLGEVSVPYGMAVWSAGIGTRPVIMDFMQQIGQVVKFK

SEQ ID NO: 56453 - protein, 497 aa, Oryza sativa
MAARCWVWGFVVALLAVAAAADGEEEEGKWEPLIRMPTEEGDDAEAAAPAPAPAAADYGGTRWAVLVAGSSGYGNYRHQADVCHAYQILQKGGVKEENIVVFMYDDIAHNILNPRPGTIINHPKGGDVYAGVPKDYTGHQVTTENFFAVLLGNKTAVTGGSGKVIDSKPEDHIFIYYSDHGGPGVLGMPNLPYLYAGDFIKVLQKKHASNSYSKMVIYVEACESGSIFEGLMPENLNIYVTTASNAVENSWGTYCPGGEPSPPPEYITCLGDMYSVAWMEDSETHNLKKETIEDQYELVKKRTSNANKLNEGSHVMEYGGKTFKDEKLFLYQGFNPANGNITNELIWPVPKATVNQRDADLLFMWKRYEQLNGVSEDKLRALREIEDTIAHRKHLDSSIDFIGKLVFGFENGPLALEAARSSGQPLVDNWDCLKKMVRIFESQCGSLTQYGMKYMRAFANICNNGVSEAKMMEASINACGRYNSARWSPMTEGGHSA

SEQ ID NO: 56454 - protein, 984 aa, Oryza sativa
MGFDDDDEDLVVYGTPIEREEDTSARKRRAVAEAGQLRALPAWKQEVRDEEGRRRFHGAFTGGFSAGYYNTVGTKEGWTPQTFTSSRKNRAEMKKQSIYSFLDEEDIKDMGGNALETSQQYDTFGFTATEHARKQASKEQKERPSAIPGPIPDELVVPATTSIGVKLLMKMGWRQGRSIRDAHADSLYESRREARKAFLALSGTKTGGQKIQVDSHKSDKDDGATESFEELHASGNTPVYVLHPKQDLHGLGFDPFKHAPEFKDRKRLQKSARDRNRSDVSMRGSLLISNSGQYAPGFGIGALEELGVEDEDIYASGFAYEQMEVDIEPSKTASDSNYKLEDRKRGVFLAFKIASSSEYKLERFDPPEIPSDFDGRHKFLTPRQDVNNLSDLAPPEVPAPEDTSLRLLIEGCAAMVARCGKHIEDFYKEKSKTNTQFNFLNEGDGCSYYARKLWEYQQKYIDQQKPDTVQSKSSDKLTAENRGKILGERPLDRSTKSSSSSFPAKEAIQLQSNLADNFVKPISLDGLPEYEKPFRNDPAKQARFEQFLKDKYQGGLRPANLIPTSTMSDVDRARERLDFEAAAETIEKGKEKKAMDPLSLLGLSGINEQRFVSSTESERSIPARDEKSIYPRREEFEWRPSPILCKRFDIVDPFMGKPFHVQRPRSKMDSLIFMSESTTRTNEVESSSIAPQHTSVAGATETEAKGAATDPEIESSSVQRPVDLYKAIFSDDSDDDMAEPLANQPVDPVKTSEDANMVLNRLVAEDFLESLGKELGLDVPPEKPTPPNVLFRSETPSTANAIGISRNRKAITCQEIKENESALDKEEIANASADVPSDNVEELGLKYEKQEHRAEKSRSRSSHRQTQSGSLDSDSTSDQHRSRERRSRHKIRSGTPGSDSSIEHHRSKKRKSHSKHRTRRSRSPYADSSDSQYTKRKHREKRHHRTRNPDTDSSDHEYEERHKSSSRRSSDKDRSRRRSRHHKR

SEQ ID NO: 56455 - protein, 216 aa, Oryza sativa; identical to SEQ ID NO: 39179

SEQ ID NO: 56456 - protein, 249 aa, Oryza sativa
MDYSAMPSPSPSSSAAAAAAAASGCCLDRLWRACGGCGAAAASAAGWTVCALLTCVFAVVGSLVGVFIGAFMGMSTESGMLRGAGVGVVSGAVFSIEAVESCIEIWRSSESGKYSIIFVLDIISSLFSGRIVWEKVSPALQRAVQSQMSLLSTPFIDNNDLFETGNTGGMSRDLINRIPKTTFSAATNPDQETDNCCAVCLQDFGALQFVRVLPHCQHTFHARCIDNWLFRHASCPLCRAGVHIDHIHM

SEQ ID NO: 56457 - protein, 339 aa, Oryza sativa; identical to SEQ ID NO: 43895

SEQ ID NO: 56458 - protein, 504 aa, Oryza sativa
MLRSPGHSPRHLSPSPAPSTPRPSSPTPSSASASASASALAAAATTTTSSKRRRPEVLDEDTYVAAVERIIERDFFPDLPRLRDRLDWLQALRSRDPLVLRDAQLKILERRRRAQRQRQGGPVPTPTPATSTALRSPSFLATPSVAPSVAGDEGADVDDDVEAALSLDDFFRRFTSEDNESFSRILEKVNHRRRERYAHLLEPGEVAKAPQLEDAKRDRITDGYGTSGQPLSTLEGAKFTAKNLLMYYPADRGEAPLTDEERAERLKGMTKEIDRSNTRFHGKSSVDDGAKEEEAAAILYAPVAGSTPGGMAYHDPDKAKKYDLEDLRKTPNPFYVESGKNANNGYSFVRTPSPAPGVDESPFMTWGEIDGTPLRLDPEETPGGSGGSDRAHFKIPPPPARDVKAHLLSRDAARKIKERTKMFHKPPLPSPVRGGSASPRTFSPAAQKFVRNAIAKSSRTIDESLRASYRGTTPSATTPKTRFSRDPSLGSRSPSTRQGSTPPW

SEQ ID NO: 56459 - protein, 118 aa, Oryza sativa
MVSPCRRCSGHLPHSLHLPLPSPGARRPGTRVSAGVATSRPPEHRRPTSLSSVFSAGRRRKEEDGRRREKEKRKRKGERSDRWALLQYNFVFSRFNSNLIFRSPYLLHHRSDSSQTWT

SEQ ID NO: 56460 - protein, 89 aa, Oryza sativa; identical to SEQ ID NO: 56362

SEQ ID NO: 56461 - protein, 469 aa, Oryza sativa
MASSSENVEAPRDEQRDPPPSPPNPSVEAGAGEEMEAEGEGEEEVKTLERAEELFERGSKAIEEGDFVDAVDCLSRALEIRVAHHGELAPECVSTYFKYGCALLYKAQDEADPLGNVPKSSSNKESMKSTTNKDDSGSSKTPGSNTEDAPSTDKADAEEGQNSTGKGQEEENGDSDKDDDEMVGDEDDSDLDQAWKMLDIARAIVEKSPDDTLEKAKIFSALAEVSMEREDIDNSLGDYFKALAILEKLFEPDHRRIIDLNFRICLVYELVSKISDAIPYCAKAISLCKSRIQSLKNDKDALLAGKDDNASAADGGSEKSAPEGEIEQLSGILSELEKKLEDLEQAMSTPSSVMDEIMKRIASKAGGEQNATDTMPAAASFNSSSQMAGSSNGFDSSTLSTAATTGSTGSTVTDLGVVGRGIKRANIKPISAEPPPKRAAADSLSVKGDSSNNSDVHTPAQEGDDSVSK

SEQ ID NO: 56462 - protein, 505 aa, Oryza sativa
MAAPSAIPRRGLFIGGGWREPSLGRRLPVVNPATEATIGDIPAATAEDVELAVSAARDAFGRDGGRHWSRAPGAVRAKYLKAIAAKIKDKKSYLALLETLDSGKPLDEAAGDMEDVAACFEYYADLAEALDGKQRAPISLPMENFESYVLKEPIGVVGLITPWNYPLLMATWKVAPALAAGCTAVLKPSELASLTCLELGGICAEIGLPPGVLNIITGLGTEAGAPLASHPHVDKIAFTGSTETGKRIMITASQMVKPVSLELGGKSPLIVFDDVDIDKAVEWAMFGCFANAGQVCSATSRLLLHEKIAKRFLDRLVAWAKSIKISDPLEEGCRLGSVVSEGQYQKIMKFISTARCEGATILYGGARPQHLKRGFFIEPTIITNVSTSMQIWREEVFGPVICVKEFRTEREAVELANDTHYGLAGAVISNDLERCERISKAIQSGIVWINCSQPCFVQAPWGGNKRSGFGRELGQWGLDNYLSVKQVTKYCSDEPYGWYRPPSKL

SEQ ID NO: 56463 - protein, 445 aa, Oryza sativa
MSFRSIVRDVRDSFGSLSRRSFEVTLAGLSGLTGHHRGKSQSTVHELCDADLIIQESRWASLPPELLRDVIRRLEASESTWPSRKDVVSCAAVCKAWREMCKEIVLSPEFCGKLTFPLSLKQPGPRDGMIQCFIKRDKSKSTYHLYLCLSTAVLADSGKFLLSAKRHRKTTCTEYVISMDADNISRSSSTYIGKLRSNFLGTKFIIYDTQPSYNGAVIPPVGRSSRRFNSKKVSPKMPSGSYNIAQVTYELNVLGTRGPRRMHCVMHSIPASSVEPGGIVPGQPEQIVPRAFEESFRSTTSFSKSSIMDRSMDFSSSRDFSSARFSDIAGGTINGDEEGQNKERPLVLRNKAPRWHEQLQCWCLNFRGRVTIASVKNFQLIAAPAQPPAGAPTPSQPAPPEQDKIILQFGKVAKDMFTMDYRYPLSAFQAFAICLSSFDTKLACE

SEQ ID NO: 56464 - protein, 78 aa, Oryza sativa
MAGDPAAAAAAVGAMRPWNYVVTAHKLTVVARSCVGNFTAPDHLDLSKFTRIEIGVSAYSSGSSGQTDLPRPEYVPSV

SEQ ID NO: 56465 - protein, 362 aa, Oryza sativa
MAGQMLPPIALVAVAICITAAAAAKVPAIYVFGDSTADVGNNNYLTGAAVPRANFPHNGIDFPTSRPTGRFSNGYNGVDFLALNMGFRRSPPPFLAVANKTSNPLFRGLQGTNFASAGSGILDSTGQSIIPMSKQVQQFAAVQRNISARISQQAADTVLSRSLFLISTGGNDIFAFFSANSTPSSAEMQRFVTNLVSLYTNHVKDLYVLGARKFAVIDVPPIGCCPYPRSLQPLGACIDVLNELARGLNKGVKDAMHGLSVSFSGFKYSIGSSHAVVQSIMKHPQRLGFKEVTTACCGSGKFNGESGCTPNATLCDNRHDYLFWDLLHPTHATSKIAAAAIYNGSVRFAAPINFRQLVDDQH

SEQ ID NO: 56466 - protein, 460 aa, Oryza sativa
MPSANVRGAQPSADRRLSTLVRHLLPSSARTATTTSTSSSAADADSSLQAFPTMASSSVFAGLAQAPEDPILGVTVAYNKDPSPVKVNLGVGAYRTEEGKPLVLNVVRRAEQMLINNPSRVKEYLPITGLADFNKLSAKLIFGADSPAIQENRVATVQCLSGTGSLRVGGEFLARHYHERTIYIPQPTWGNHPKVFTLAGLTVRSYRYYDPATRGLDFQGLLEDLGSAPSGAIVLLHACAHNPTGVDPTLDQWEQIRQLMRSKALLPFFDSAYQGFASGSLDQDAQSVRMFVADGGELLMAQSYAKNMGLYGERVGALSIVCGSADVAVRVESQLKLVIRPMYSNPPIHGASIVATILKDSAMFNEWTVELKGMADRIISMRQQLFDALKTRETPGDWSHIIKQIGMFTFTGLNSDQVAFMRQEYHIYMTSDGRISMAGLSGRTIPHLADAIHAAVTKLK

SEQ ID NO: 56467 - protein, 369 aa, Oryza sativa
MNKRPRDEPSSSFASAPKRQYGAGGGGYGGHGYSEERSSARRVADHYSARSNQTLEERENSPIIHLKKLNNWIKSVLIQLYAHPGDCVLDLACGKGGDLIKWDKAKVGYYVGVDIAEGSIKDCMTRYNGDTDQQRRKKFSFPAQLICADCYEARLDEHLYEDAPFDICSCQFALHYSWSTEARARQALANVSALLRPGGVFIGTMPDANVIIKRLRETDGMEFGNGVYWISFGEEYAEKKFPASRPFGIKYKFHLEDAVDCPEWVVPFHLFKLLAEEYDLELVLTKNFHEFVHEYLQKPEFAELMRRLGALGDGRQDQSTLSQDEWEVAYLYLAFVLRKRGQPPSQRRANNANRGKMFLTENDIDFLGV

SEQ ID NO: 56468 - protein, 471 aa, Oryza sativa
MGDCVVVENGHPVPKEEDAPVVAVERLPEGAGKPREEGSRGQRKQGGIRREPSFSRWCKDCSAMSNAPPGGASPASAASDDDSEEFELPLLPSDSGGGGGSHLPMDIEAGAAARSDDLPISPWLIAKVIALIASWYTLSTCLTLYNKEMLGKHMWKFPAPFLMNTVHFTMQAVASRVIVWFQHRGLEGAASAMTWRDYFLRVVPTALATALDINLSNISLVFITVTFATMCKSAAPIFILLFAFLFRLEKPSFNLLGIILIVSFGVLLTVAKETEFNLWGFVFIMLAAVMSGFRWCMTQILLQKEEYGLRNPFTLMSYVTPVMAITTAILSIAMDPWHDVRASHFFDNSTHIIRSSLLMLLGGALAFFMVLTEYVLVSVTSAVTVTVAGIVKEAVTILVAVLFFNDTFTWLKGLGLGIIIFGVSLFNLYKYHRFKKGHRNKNCDKNPQTSSGASKYVILDDDDMENQGNSG

SEQ ID NO: 56469 - protein, 647 aa, Oryza sativa
MALKESLDPAGRVLGSWARSGEPCGGSFVGVTCDSGGRVTAISLQGRGLSGTLPPAIAGLRRLTGLYLHYNGIKGAIPREIGSLSELTDLYLDVNHLTGPLPVEIAAMENLQVLQLGYNQLTGSIPPQLGKLNKLAVLALQSNQLTGAIPATLGDLTQLARLDLSFNSLFGSIPSKIAEVPLLEVFDVRNNSLSGSVPAGLRRLNGGFQYVNNKGLCGVGFSLLDLCLSSEDGLKPSKPEPFGPDGTVKTRQVPQSANTDNHCEGSGCSKSSNASVGVLVVGVVAVVIGAAFCGIFAFSYYRRQKQKIGSSLEVSDSRLSTDHYQQKEVCRRSASPLISVEYSNGWDPLSGGGVGSSGEVGDSFRFNLEEVECATQYFSEVNLLGKSGFAATYKGILRDGSVVAVKSLNKTSCKQEESDFLRGLKMLTVLRHENLVGLRGFCCSRGRGECFLVYDYMVNGCLSQYLDVKEGSGANVLDWPTRVSIIRGIAKGVEYMHSKKANKPSVVHQNISAEKILLDHHLTPRLSVPGLHKLLADDVVFSTLKASAAMGYLAPEYATTGRFTEKSDVFAFGIVVLQVITGRRAVSQLKVSTVANDLDSLIDENLNGVFSRTEAAKLAAIAALCTSETASQRPTMEAVVQQLSNCH

SEQ ID NO: 56470 - protein, 493 aa, Oryza sativa
MEPKSSSSSHYLQPSATLPSTRRNSFQGVGAEAGGGGGGMNPFGPTFSDPLCSLNLKETSEFVRSSFPMATMARSNSSNGATGNGGHGYHRGTSTASSSSSSSASAQRRRAEQQQQQVPATPGRPLLFFNSSSPAHHQLVSARRSVPSKWEDAEKWVRQASSDHHGGHHHHHGKGSKLQEEKRASAVRRSVDADVTALALYTAPAAEVFLKDKFTDNVEPSKESFVFRSSYCEPTKNTAAQAVAAGNGIDHRRDIGTEMTPLGSSTTSRCHTPIKSTSPARHNTPASRSGPLVPYAGGGGGAGQDISDLADCHFAKLDLGAQFDAMLINWSSKEEEEEEVSKSLRHFEASVAAVGEKRGGAGDCRWEDDDRAKSCIRYQREEAKIQAWINLESAKAEAQSRKLEVKIQKMRSNLEEKLMRRMTTVHRRAEEWRATAQAQHLQQLKRAAEQVRRAKATSHHHHHHHLAGSNASCGCFPCNGSNNIISGNLLNYY

SEQ ID NO: 56471 - protein, 174 aa, Oryza sativa; identical to SEQ ID NO: 56412

SEQ ID NO: 56472 - protein, 444 aa, Oryza sativa
MSAVSIVDVSYVAVPATAALPPEPIKLTAMEALWLPFPVLQHVLFYEVAGSPPFDSVVRSLRSSLGATLASFAPLAGKLVYLEGTGDVAIACSASDAVKFVAAESDADVRRLAGDELHDLATFQKLVPELDMGKLPTSVLAVQATRLEGGLAVGVTVHHGVADGKSLWMFLEAWAAACRGEATPVATPCFDRSAIKLHLGEEIARTVLRKYAPKLPQVAELEIFVEQRNRFTRRTFTVDAQQIERLKQRIARDGEARGAPLRRPPSTFVAVVATAWTCFARCKTTAADDGEVFLVFIADVRERLDPPVGAGYFGSCLTVRVARLPVRDIHGDGALAAAASAIQEEIAKVAEDPLAGWDFLRLMETLVPVTERAMNVSGSPAFRPYDVGDFGWGKPRRTEPIRMNHDGQVALVRAKDGRAVQVSVSLLRSAHMQGFKSQLLELLG

SEQ ID NO: 56473 - protein, 281 aa, Oryza sativa
MECESNYSKEQRLNGDSLVFDLDDTLYPVTSGIGADVVRNIQAYMIEKLGVEESISLELCVLLYKQYGTTMAGLRAVGYQFDYDDFHSYVHGRLAYEKIKPDPVLRNILLSLPIRKVVFTNGDRIHASRALKRLGIEDCFERVVCFETLNPTSSSLSAAGQVEIFDIMKHLAHPEPGVELPKSPILCKPNIDAMRQALKVASINPKTSILFDDSARNIQAAKLIGMYTVLVGTSERIKGADHALESLHNMKEALPELWDEAVKDEDVRKSSKVGIETSVIA

SEQ ID NO: 56474 - protein, 218 aa, Oryza sativa; identical to SEQ ID NO: 36850

SEQ ID NO: 56475 - protein, 159 aa, Oryza sativa
MFLSCLLQQETLFFIKQIESLGNACGTIALLHAVGNAYSEISLSENSFLDMFIKSTSGMTSYERAVFLEKDDDMARAHLSAASAGDTKLSDDVEEHYICFVECDGTLYELDGMKPGPINHGPSSSKSLLQDAVNIIKATMHNIPNSVNFNVIVLSRKAE

SEQ ID NO: 56476 - protein, 487 aa, Oryza sativa
MGEAVLVSNHGCSGGGGRVGVGVRGAGGGGPGEGKAEGQQGQVLALLLAALRRSVVLPCQMADADDPAAVAWGMEIGWPTDVRHVAHVTFDRLNGFLGLPAEFELEIPGHVPSASASVFGVSPESMQCCFDDNGNSVPKILLLMQERLYAQDGLKAEGIFRITPENSQEENVREQLNRGLVPDDIDVHCLASLIKAWFRELPEGVLDSLSPEQVLHCNTEEECVELVRLLPPTQAALLNWVVEFMADVVEEEESNKMNARNVAMVFAPNMTQMSDPLTALMHAVQVMNLLKTLILKTLREREHDESEYSAISSQSSSSDELDEMHHHVEQGGDSGSDTDNFGDDGSQSQKDVAKVLQQNVVNEQPIGASRRHTSIDFRLPYISYGSDDDVSPNDIEECFLRRLEWNAVSKDASEIGSITVRSNQEAGQLSFSEENDGYYSTDYQSRNILLKDSVGIQSTLPRETESRAEITNDEVQDGAEVEVTLEQ

SEQ ID NO: 56477 - protein, 530 aa, Oryza sativa
MKATHVATACAVAAFKLRRPVRMYLDRKTDMIMAGGRHPMKAKYSVGFKSDGKITALHLDLKINAGISPEFSPAIPYAIVGALKKYSWGALAFDIKVCKTNVSSKSAMRAPGDAQGSFIAEAIVEHVASTLSVATNTIRRKNLHDLESLKVFFGDSAAGEASTSSYSLVIIFDRLASTPEYQRRAAMVEQFNGSSRWKKRGISCVPITYSVTLRPSPGKVSILNDGSIAVEVGGVEIGQGLWTKVKQMTAFALGQLCDDGGEGLLDNVRVIQADTLSMIQGGWTAGSTTSETSCEAVRKSCAALVERLKPIKEKAGTLPWKSFIAQASMASVKLTEHAYWTPDPTFTSYMNYGAATSEVEVDVLTGATTILRSDLVYDCGQSLNPAVDLGQVEGAFVQGVGFFTNEEYATNADGLVIHDGTWTYKIPTVDTIPKQFNVELINTARHHSRVLSSKASGEPPLLLASSVHCAMREAIRAARREFAAVGGGTGGSDQVTSFQMDVPATMPAVKELCGLDVVERYLESFSATTA

SEQ ID NO: 56478 - protein, 640 aa, Oryza sativa
MGHLSIRNPLSLLLSLQLSLLLFNPLSVADLTSEKQALLDFASAVYRGNRLNWSQSTSLCSWHGVKCSGDQSHIFELRVPGAGLIGAIPPNTLGKLDSLQVLSLRSNRLAGSLPSDVTTLPSLRSIYLQHNNFSGDLPSFLNPNLSVVDLSYNSFTGEIPISLQNLSQLSVLNLQENSLSGSIPDLKLPSLRLLNLSNNDLKGQIPQSLQTFPNGSFLGNPGLCGPPLAKCLLPDSPTPSPASPSSAPTPMSAHHEKKFGAGFIIAVAVGGFAVLMFVVVVLVVCNSKRKGKKESGVDYKGKGTGVRSEKPKQEFSSGVQIAEKNKLVFLEGCSYTFDLEDLLRASAEVLGKGSYGTAYKAILEDGTVVVVKRLKDVVAGKKEFEQQMELIGRLGKHANLVPLRAYYYSKDEKLIVYDYLTNGSFSTKLHGIRGVTEKTPLDWSTRVKIILGTAYGIAHVHAEGGAKLTHGNIKSANILLDQDYSSYVSDYGLTALMSVPANASRVVVGYRAPETIENRKITQKSDVYSFGVLLMEMLTGKAPLQSQGNDDVVDLPRWVHSVVREEWTAEVFDVELIKQQNIEEELVQMLQIAMACTSRSPDRRPSMEDVIRMIEGLRHSASESRASSDEKMKDSNPPSV

SEQ ID NO: 56479 - protein, 103 aa, Oryza sativa
MSSSSLSKKASSFVVTASMSAVEALKDQAGLCRWDYALRSLYQRAAAAKQVTGRAVPVSLSSQTGGAAASSSPAAACGRAARSKRSEEEKMQKAYHLVCWGPN

SEQ ID NO: 56480 - protein, 334 aa, Oryza sativa
MATTRGQLPVEDVLRVNGSRRFAAALAAASPFASLADALLAARRIWLNEVDVNGWLEAFAAHPAIGTTSSSAPKWCKEEQSAALATATDSTAQELADWNARYREKFGFVFMICASGRTAPEVLAELKRRYENRPIVELEIAAQEELKITELRLAKLFASEPVAPPSSTVGGPTSQSDKAADRMRIIGAHLGSHTQHSANKAPEITGSSNRTRPPITTHVLDVARGSPASGIEVHLEMWKDASTPPSFNNKDFNGWATLGSSVTNNDGRSGQLMDIVNNVAPGFYRISFNTSKYAPSGFFPYVSIIFEIKKNQTTEHFHVPLLHSPFSFTTYRGS

SEQ ID NO: 56481 - protein, 868 aa, Oryza sativa
MSTLAAHPPLGPAAAAQEKAASRNKRKYRAEPPSAELGSFGLEYPLTADCVGFEFMSPEKAAIAAAAAAAAVAAEGVNLDLIPGSCDCKDIHPTAEELLECQRYVNWNDPNEALLEEILLKGLDATFDNAVGVIIAMGYSEPTARAAVLRAATQYNWRESLAGFGEAAVEVLKTEGDMLSEGASEEDMRKIEQAVLGGMIALVNQAQPFYTTGDVMFCLLMSDMNVANACAMDYNPASLPAVDTQVIAQPVVGNYEPNNPSSDLSVSITNPQTGVTFRGKLTPVPPNSYNTAKADSSATPANLNVPSSKPSVSGKAQSEIPNLKPKENSNPVPDHSEEQPFVAAATQPVKDDKPIPSKRGSSKRDSLHRQKLMSFDKSSRALGSKGSLRSSKHSSLGSAVLDRKCRSFSDSTTSSLKASSKVGKGFSASMKGPEVPPDLSFTGAALPSNPSFDAKLSSNLNPLPAASTDLSLSLPLPSSNDSPAPSSNHDANTEGMDSSSKINLSYDEDQKVWIPQDKKDEMVLILVQRQKELQAHMRDWTDWAQQKVMQVTRRLAKEKEELHSLRKEKEEADRLQEERHNLEESTRKKLLEMESAISRANTQLEKAESSARRREAENEQLRIQMEAAKRHALVSATNILELSKKDENSHKRSQHWESERALLQEDLAAQRNKLSQVHQQLHHAKEQKDQIQARWRQEEAGKIEAIARVSLEKKERDQIETSLRSEENFLHLKAENDTQRYKSQIRALEQQISQLKVSLDSLRVGAPPKWGADNRTNALRLSEGRKNGSAQILANIAAVPQDFDFDDIQRDRECVMCLSEEMSVVFLPCAHQVVCAKCNDLHDKQGMKECPSCRTPIQRRVCARLAGC

SEQ ID NO: 56482 - protein, 502 aa, Oryza sativa
MATAAALALHTQFRPPRSPRRLRQHLALPSGVLIRSPVRASAASASASAPAQREAAAAGVPWGCEIESLESAVSLERWLTDSGLPEQRLGIQRVDVGERGLVALKNIRKGEKLLFVPPSLVITADSEWGCPEVGNVLKRNSVPDWPLIATYLISEASLESSSRWSSYIAALPRQPYSLLYWTRPELDAYLVASPIRERAIQRITDVVGTYNDLRDRIFSKHSDLFPEEVYNLETFRWSFGILFSRLVRLPSMDGRVALVPWADMLNHSPEVETFLDYDKSSGGIVFTTDRSYQPGEQVFISYGKKSSGELLLSYGFVPKEGTNPNDSVELLVSLNKSDKCYKEKLQALKRNGLSEFESFPLRVTGWPVELMAYAFLVVSPPEMSQRFEEMAVAASNKSPSKPGLNYPELEEQALQFILDCCESNIAKYTKFLEGSSGSLQLSTNSKQANRTLLLKQLARDLCISERRILYRTQYILRRRLRDMRGGELKALSLFNGLRKLFK

SEQ ID NO: 56483 - protein, 40 aa, Oryza sativa
MNKKKKTGYPTAAGAAEQGGKKSRRGSTKSRGDKGFIEGW

SEQ ID NO: 56484 - protein, 594 aa, Oryza sativa
MASSASLQRFLPPYPHAAASRCRPPGVRARPVQSSTVSAPSSSTPAADEAVSAGRLEPRVEQREGRYWVLKEKYRTGLNPQEKVKLGKEPMSLFMEGGIKELAKMPMEEIEADKLSKEDIDVRLKWLGLFHRRKHQYGRFMMRLKLPNGVTTSEQTRYLASVIEAYGKEGCADVTTRRQIRGVTLPDVPAILDGLNAVGLTSLQSGMDNVRNPVGNPLAGIDPDEIVDTRSYTNLLSSYITSNFQGNPTITNLPRKWNVCVIGSHDLYEHPHINDLAYMPAVKGGKFGFNLLVGGFISPKRWEEALPLDAWVPGDDIIPVCKAVLEAYRDLGTRGNRQKTRMMWLIDELGMEAFRSEVEKRMPNGVLERAAPEDLIDKKWQRRDYLGVHPQKQEGMSYVGLHVPVGRVQAADMFELARLADEYGSGELRLTVEQNIVIPNVKNEKVEALLSEPLLQKFSPQPSLLLKGLVACTGNQFCGQAIIETKQRALLVTSQVEKLVSVPRAVRMHWTGCPNSCGQVQVADIGFMGCLTKDSAGKIVEAADIFVGGRVGSDSHLAGAYKKSVPCDELAPIVADILVERFGAVRREREEDEE

SEQ ID NO: 56485 - protein, 470 aa, Oryza sativa
MHRREFALFLLYLKMDTHALPLLCILCLITLLQLDGGAAISGGTNDGSERWGYVQVRPKAHLFWWYYRSPQRVSSPGGKPWPTILWLQGGPGASGVGLGNFLEVGPLDGDLKPRGSTWLQKADLIFVDNPVGTGYSYVEDDALLVTTDGEAAADLAALLRALAAKEIPTLQSSPLFLVAESYGGKYAATLGVSLARAIRAGGLKLTLAGVALGDSWISPEDFALSYGPLLRQVSRLDSNGADSASKKAQVVKQRIASGQWKLAQYALSSMLTSIVASSGHVDVYNFLLDTGMDPVAAGAAPARSFPPAYSAYLDSKLSVGDSIRSVMNGAIKEKLKIIPKDVVWEEQSYTVYNALINDFMKPRIQEVDELLSYGVNVTVYNGQLDVICSTVGAEAWVQKLKWDGLKNFLRLPRQPLHCGSSEVTKGFVRSYKNLHFYWILGAGHFVPVDQPCIALDMIGSITQSSVQSHP

SEQ ID NO: 56486 - protein, 61 aa, Oryza sativa
MRIICCHAIAHHDRASLQFIVRFSARVLGWLFQPHCSSAIHKQVSRMVSSHHLPAQEVENN

SEQ ID NO: 56487 - protein, 303 aa, Oryza sativa
MAGKKKALTNPASPSASASASTPKKSTATSKDRSTPKPRKNPNPKEEAPPPPPANNKRLNPQGGSNRKKKADAGTPSKKPKRQPPEPKPRKHKGAKSEKPHRVSGEGEKPTPTKKKKKKESSKEPKREKQQASAPMSTPSKKNKEAKRDTGGAGKPTPTKRKLGDVDPPQERPSGEGQASSPTPAKKRKDKAAAAEAVADHGAGSFPMARVRQIMRAEDATIRPSNEAVFLINKATEIFLKRFADDAYRNALKDRKKSIVYDNLSTAVCNQKRYKFLSDFVPQKVTAEDALKAPVSSQVNQPQ

SEQ ID NO: 56488 - protein, 768 aa, Oryza sativa
MATIQDIGVSAAINILSAITFLLAFAFLRLQPINDRVYFPKWYLKGARESPSHGGAFVRKFVNLDMRSYLKVLSWMPAALKMPEDELISHAGLDSAVYLRIYLIGLKIFAPITVLAFIILVPVNWTNITLQSSKVQHSDIDKLSISNIPVGSKRFAAHLTMAYVFTFWTCYVLLREYEIVATMRLRFLASEKRRPDQFTVLVRNIPPDPDESIGELVEHFFLVNHPDHYLTHQVVYNANKLDKMVKEKKKMQNWLDYYQLKYERNTSQRPTTKTGFLGCFGSKVDAIEYYTSEIERIEKEETDERGKIMKDPKSVVPAAFVSFRSRWGAAVCAQTQQTSNPTVWLTEWAPEPRDVYWDNLSIPFVYLTIRRLIIAVAFFFLNFFYVLPIAFVQSLANIEGIEKAAPFLKPLIEMRTIKSFIQGFLPGIALKIFLILLPSILMFMSKVEGLTSVSSLERRSAFKYYIFLFFNVFLGSIIAGSALEQLKTFLHQSANEIPRTIGEAIPMKATFFITYVMVDGWAGVAGEILRLKPLIIFHLKNFFLVKTEKDREEAMDPGSIGFDSNEPQIQLYFLLGLVYAVVTPFLLPFILIFFGLAYVVYRHQIINVYNQEYESAAAFWPSVHGRIIVALIVSQLLLLGLLSTKGAGQSTPVLLVLPVVTFYFYKYCKNRYEPAFVEYPLQDAMRKDTLERAREPGFDLKGYLMNAYIHPVFKGDEDDEKFSISDEPEAEQVLVATKRQSRRNTPVPSKYNGSESPSLAEIVNDQRL

SEQ ID NO: 56489 - protein, 436 aa, Oryza sativa
MAAASLIKAPVGQNPARMGAGRSSGGGGVVRCSLQGAVVGGRAEWQSSCAVLSSKVAALGAASPHAAAPSFVNGHVAPLVPEQQAAAEDGGAVLDLVPVSSVNGGGVAKNLPQPLRISDLSPAPMHGSQLRVAYQGVPGAYSEKAAGKAYPGCDAIPCDQFEVAFSAVELWIADRAVLPVENSLGGSIHRNYDLLLRHRLHIVGEVQLPVHHCLMALPGVRKECLTRVMSHPQALAQCEHTLTAMGLNVVREAFDDTAGAAEYVAANGLRDTAAIASSRAAELYGMEVLADGIQDDCGNVTRFVMLAREPIVPRTDRPFKTSIVFAHDKEGTSVLFKVLSAFAFRDITLTKIESRPHRHRPIRLVDDANVGTAKHFEYMFYVDFQASLAEPRAQNALAEVQEYTSFLRVLGSYPMDMTPMTAGSSSTVTSDDSSST

SEQ ID NO: 56490 - protein, 220 aa, Oryza sativa; identical to SEQ ID NO: 32059

SEQ ID NO: 56491 - protein, 350 aa, Oryza sativa
MEQGGEAGTGGGLGNLRALLAILQWWGFNVTVIIINKWIFQKLDFKFPLTVSCVHFICSSIGAYIAIHVLKAKPLIQVEPEDRWRRIFPMSFVFCINIVLGNVSLRYIPVSFMQTIKSFTPATTVILQWLVWSKHFEWRIWASLVPIVGGILLTSITELSFNMFGFCAAMVGCLATSTKTILAESLLHGYKFDSINTVYYMAPFATMILALPAVLLEGGGVVTWFYTHDSIASALVIIIGSGVLAFCLNFSIFYVIHSTTAVTFNVAGNLKVAVAVLVSWLIFRNPISPMNAIGCAITLVGCTFYGYVRHLIPQQQAVAPGTGSPTTSQTNSPRSRMEMLPLVGDKQEKV

SEQ ID NO: 56492 - protein, 166 aa, Oryza sativa
MGRGKFKGKPTGRRNFSTPEEIAAGTSGGPRTFKKNLAEEEKEEEEDDIEESEEEESEDESEGKAKHKGTEGLIQIENPNLVKAKNIKAKEVDLGKTTELSRREREEIEKQKAHERYMKLQEQGKTEQARKDLERLALIRQQRADAAKKREEEKAAKEQRKAEARK

SEQ ID NO: 56493 - protein, 45 aa, Oryza sativa; identical to SEQ ID NO: 36837

SEQ ID NO: 56494 - protein, 242 aa, Oryza sativa
MAIIGATTMNFDFFQSLGLGNSIWNNGPLDTQIQWFQQLLPSICGNDCKSYLSKSLFIVGEFGGNDYNAPLFGGKSMDETLIGLGAVDIVVPGVMPIGCFPLYLTLYQSSNSDDYDGNGCLKSYNSLSVYHNGLLKQGLAGVQAKYQAVRLMYGNFYDQVTQMVQSPGSFGLQYGLKVCCGAGGQGSYNYNNKARCGMSGASACGDPENYLVWDGIHLTEAAYRSIADGWLSGPYCSPAILH

SEQ ID NO: 56495 - protein, 380 aa, Oryza sativa; identical to SEQ ID NO: 56017

SEQ ID NO: 56496 - protein, 777 aa, Oryza sativa
MAAAMATGGLDPAAREAELAHLPGPKLVDHLCTTHRRADYEAVARVLDARDRRLEAALAENEDLRRKCDALLVGQRRPREEEEEEAAGEKPPPGIIAAPEPARRDEEEVEGSSEEGEVRGVDFIDLSSSSSDDEEEKEVEAGRGAGSRVPIIKEAPDDAEGDEDDTLPLSQLWKRRRLGEPGAVKSEKGDGHNPVDSGGNDPPKCTSARTDVPEASTGEMVSRPGDSMVAAFVQGKGTVQPENVGGEMPRVMLHSPAQVIRSTLQKRKFGKKDGSSAISGDTTSSQARSTSLAPKREGSAAVPGYTTSSQARNTGLSPKKCRDSTSPDDEMCNALADSVQVGAGSTMPRGPGEQDKGIGAVQRATVLHGTSGIGEQGGKLDSTPTKVRESNRREGGLQNKSIDSKSNDALKHQDKKDGRMVQKGDLSVQSCVPARPIVASVPSVTKNSEKGNSEKGVSQPPKGNDQMNKMSMVESSSKCGYEKVGADVQKCSPLPRQSEEGSVARGVVSFEETGIATVHPLSIRNLSGPELRNLNKGGGELSKKLVVEGSPKYGEKNNDARSEKNSSPLGQSEDVKIIREGASNEEPRVGRLSPSILSNYSTGEQIHSVSKNAELCSPTAKKALFEPGSSCTPLKHTVCPPSSGKSISIQAKGEINLLPSAMSRHWETAAHMIASLRGNMELSMQALCALYRQRKLVIMSTEGQQTGTTGLTKIDAVRAIRLLEFLLDGKLKGPLKRTAKELLSHDATGPTFLEKVALSFSKELFDIYKNKKDPYFC

SEQ ID NO: 56497 - protein, 1196 aa, Oryza sativa
MPEKAAEANLRKQLEQTLAGEPSSPLHHYNLGVFLWDRAEAAAREEGEEEEEVRRLRAAAAERFLAAAKLDPNDGVPFRFLGHHYALAGDAQRAAKCYQRAATLNPDDAEAGEAVCDLLDLEGKESLEIALCKEAAGKSPRAFWAFRRLGYLQVHQKKWSEAIQSLQYAIRGYPTCADLWEALGLAYHRLGMFTAAVKSYGRAVELDGSKVFALIESGNIQLMLGYFRKGVEQFRSALEMAPQNHSAYFGLASALLAWARQCVMTGAFGWAASLLKEACKAAKVCTSLTGNLSCVWKLHGDAQLALARCFPWGDGNIKGGMDDGTFRTTVLEWRNTCLLAANGAKFSYQRALHLTPWEANIHNDTAICLDLIYTIEENNSLDPITWELPEKMSLGGLILEPVNKDFWVTLGSVSSNQALKQHSFIRALHLDMSLSEAWAYLGKIYRHSGDKQLARQAFDRARSIDPSLALPWAGMSAENYHQPGDGPVNECFESCLRAVQILPLPEFQIGLGTIAARSGELLSPQVLMAVRQAVQRAPHYPESHNINGLVSEVRSDFQSAIASYRQAKFALDMMRNSKTDCRCHIADISVNLARSLCKTGLATEAVRECEELKRQGFLNDDGLQIYALSLWKLGRHDEALSVSRNLAENLSSMKQESATAALGFICTLTYNISGKDSAAAVIHKLPGQLNYSTQLKFIISALDALQPNKRFQLPQLSMPPRLTSYEVMSEVHSNIALGNAIGGESDKFLRVDGGLSYLKKVLHMYPDCSLVRNQLGSLLLSSEDWMASHKAVRVTSLSRGYTSNRGLRSPHQIQACAAVSCYATCTSYPKFSFPTCEDQYLSGYNAICRLQRWVHLEPWNQDARRLLVLTLFQKAREEKYPKHICTILKRLILQVLSSGSNSQDNKVVQYGNYLLLLVASEVSLQSGDHGNCIAQATEALGVTSSSVDSFFAHLQLCRAYVMQGNLLNSRSEYMKCLQNRTDTEIGWVILKQLASICSLEGTPDEIEIHLGGCVERKGSNASKWMSLFYLACAQCSVWNEDFASAEKAIAQACAEGDPDSCVLFLNGAICMDIAWRFAAPQFIARAASSLRKAQQKSLASLPIVSLLLAQAEGSLGSKAKWEKNLRLEWFSWPPELRPAELYFQMHLLATQSSAATSQQNQLVETMQTPEKWLLRAIHLNPSCSRYWTALMQLVYV

SEQ ID NO: 56498 - protein, 138 aa, Oryza sativa
MAGKKVQVCALFLALNVLFTMQMGAVVQACEPYCPTPTPPVTPPPSPPSGGGNKCPIDALKLSVCANVLNLLKLKIGVPESEQCCPLLGGLVDLDAAVCLCTAIKANILGINLNIPVDLSLLLNYCHKTCPSDFTCPL

SEQ ID NO: 56499 - protein, 126 aa, Oryza sativa
MQQGDVTEAQVTWEDQQNINRFGRLNNRLHELHDEIKLAKEANENLDDAGNELILSDEDVVRFQIGEVFAHMPRDDVETRLEQMKEDAAKKLERLEQEKESIVSQMAELKKILYGKFKDAINLEED

SEQ ID NO: 56500 - protein, 726 aa, Oryza sativa
MAGAIRVTMEVGADGVAVVTICNPPVNALHPIIIQGLKEKYAEAMDRDDVKAIVLTGAGGKFCGGFDINVFTEVHKTGNVSLMPDVSVELVSNLMEAGKKPSVAAIQGLALGGGLELTMGCHARISTPEAQLGLPELTLGIIPGFGGTQRLPRLVGLPKAIEMMLQSKFITAKEGKEGGLVDALCSPDELIKMSRLWALEIANYRKPWIRSLARTDRLGSLSEARSVLNSARQQAKKVAANLPQHQACLDVMEEGVLCGGHAGVLKEAKVFKELVLSPTSKALVHAFFAQRLTTKVPGVTDVQLKPRKIRKVAVIGGGLMGSGIATALLVSNTSVVLKEVNPQFLQRGQKMIAANLEGLVKRGSLTKDKMNKAMSLLKGALDYSDFKDVDMVIEAVIEKIPLKQSIFSDLEKVCPPHCILATNTSTIDLNVVGEKTNSQDRIIGAHFFSPAHIMPLLEIVRTEKTSPQAILDLITVGKMIKKVPVVVGNCTGFAVNRTFFPYTQGSHLLVSIGIDVFRIDRVISSFGMPMGPFQLQDLAGYGVALAVKDIYAAAFGTRNLDSNLVDLMVQNGRQGKSNGKGYYLYEKGGKPKPDPSVQVVIDEYRRCAKTMPGGKPVTLSDQDILEMIFFPVVNEACRVMDENVVIRASDLDIASILGMGFPKFRGGLVFWADTIGAPYIRSKLSKWTEIYGDFFKPSSYLEDRAKRSLPLSAPNATQQASSRSRM

SEQ ID NO: 56501 - protein, 669 aa, Oryza sativa
MPPKSKAAAAAAAAAAAQPVAVEDLFTTLHRHIEAGEFPQAVKVADQVLAAAPGDEDAVRCKVVAHIKSDAIEKALAAIRAAERLPIDLSYCKAYCYYRQNKLQEALDLLKGQEETSAILQLESQIYYRLGRMNDCMNSYEKLQKFKVESMDLKINIIAALVAAGRASEVQATMKAQKVDLSSRALRDTRSFELAYNSACSLIENKKYSEAKEQLDLAKRIGKEELMVDEYGDDDIEYELAPVSAQLAYVHQLQGQTQEAMETYNNITSRNLADPSSLAVATTNLISLKGTRDAADSLRKLSRLIEKSTAPNQLQLIESLESKLSPRQKEALYSAYVLLLLHANKIDQAHEFVSGLLGMFQDSTFPVLLQAAVHVREKKVQKAEEVLSQYAEKHPENSKGVLLSLAQIAASANHFQIAADSLSKIVDIQHMPATVATLVALKERLGDSNGASSVLDSAIQWWKNSMTEDNKLEVFMREAATFKLNHGRDEEACQLYEDLVKSFGSAEALAGLVATSARTNLEKAEQYEKKLKPLQGLKGINVESLEKTSGARPFEAPKPMEQDVTDEVKKQKAKKRKRKPRYPKGFDPANPGPPPDPERWLPKRERSSYRPKRKDKRTQVRGAQGAVSRDGTSSASASSSSKANQATKAPAAAPEPPKGSNKSRKKKSR

SEQ ID NO: 56502 - protein, 702 aa, Oryza sativa
MDAAPAAAEAHDGQRERFDLGVLVGDLALDEDVASDEDESLEGLRQELDDCKDDEEVANILANGIKLRDYTKGVENNIRQIELDSIQDYIGESENLVSLHDQIRDCDNILSQMETVLTGFQTEIGSISSEIKVLQEKSMDMGLKLKNRKAAESKLSKFVEDIIVPPRMIDIIVDGEVNDEYMKTLETLSRKIKFIEVDAMVKSSKALKDVQPEVERLRQKAVSKIFEFVIQKFYALRKPKTNIQILQQSVLLKYKYTIVFLKEHAKEIYAEVRAAYIDTMNKVLSAHFRAYIQALEKLQLDIATSTDLLGVETRSTGFLFSMGKESLKTRSSVFALGERINILKEIDQPALIPHIAEAKSQKYPYEVLFRSLQKLLIDTATSEYLFSDDFFGEESLFNDIFAGPIQVVDEHFNAVLLNCYDAIGIMLMIRIIHQHQLIMFKRRIPCLDSYLDKVNLSLWPRFKMVFDLHLNSLRNANVKTLWEDDVHPHYVMRRYAEFTASLVHLNVEYGDGQLDLNLERLRMAVEELLVKLAKMFPKQKLQTVFLINNYDLTISILKEAGTEGGKAQVHFEEVLKSNISVYVEELLLEHFSDLIKFVKSRPSEDTASSSDKASVSDVEPLVKDFAGRWKAAIELMHKDVITSFSNFLCGMEILKAALTQLLLYYTRITECVKKINGGSALNKDLVSISSILYEIKKYSRTF

SEQ ID NO: 56503 - protein, 159 aa, Oryza sativa
MASYRLLVILVFSALVALAAGDTYPADCPYPCLLPPPTPVTTDCPPPPSTPSSGYSYPPPSSSSSNTPPSSSSYWNYPPPQGGGGGYIPYYQPPAGGGGGGGGFNYPAPPPPNPIVPWYPWYYRSPPSSPATAVTARGRSLLASVAVVTAAAAALITVF

SEQ ID NO: 56504 - protein, 191 aa, Oryza sativa
MEGLVVISQQRNHHNQHSGGRGKMTGPHFSSPPSSHGFRGMNCRSFHSGVCAGLLPSPPPPPARTYSSPEPKTPKQQQQLQRRGGKRSRPISISPSTSPPSRPELWAGPAFSNSPPPSSLPIPKFSLRQNRSISLELPLFERSDEVEVKPHAKSAPSSPVGGSGFDFFNDNETAVATENLRRILHLDISDH

SEQ ID NO: 56505 - protein, 298 aa, Oryza sativa
MASSSSDPDKLMSKADKLTKLSFTRWNADWKSATSLYEQAAIAYRFKKENEKAKDAFEKASKGQEMISSPWDAAKHMESAGALAKELGRWNEVSDFYRRASEFYRECGRAQPASDALAKGASFLEDNTPDEAIKMYDEACSILEEDGKEQMAFDLYRAAASLYVKLEKYSDAAATFLRLGSAADKCNAINSQCKGYLSAIIIYLYAHDFQQAQKCYNDCSEVQAFLNSDQNRCAMKLLSAYEEGDAEGIKQAAQSSAIKHLDHVVIRLAKKLPTGDLQTIKKLADDDGEDSLDENDLT

SEQ ID NO: 56506 - protein, 616 aa, Oryza sativa
MAVLAEIAGDESPPPLPPSEGGEASGAPSTSSPSDADGGGKPSPRTSKPGRKRLVLTASVLLSFLIGLPLLLKSTEIHRSPLPSDAIAALSRRLHSNPPSFPCGLHAVFLRSGRDPSEASVANRIEREISTQLVDLPDASTAGKISVSVTVESAGGCSSSSKVASPWRCGAVTTADLGRGDEVFDELLDSALGDGGGDGMRVYTVVFVDSDDLKRIVIGEHRHAWVVGKVDEAEVVSIIGKVFVKYFMNGGVEEGEASTVKREFMPVGSDGNIVLSFSLLNADPSDWVYDWEFENIGQRMLTPVIEALRPIANINIESQVLYHTPKSSYSYSDDKLGGNVLSVGDIPFFVNSNEWHLDTSISATGRSKVLQFVVYIPSARECPLYLQLPDGELSKTNAFISPMWGGVVIWNPPGCSFGSKPHGALDKMSSEELMETIEIFIGQLRQLFGLKSSYHTQSMDGVTKFITSPKGFAQWELDLLYRHHACSNLLSCLTTLESLSSLVQSLPRMIVMDEIGRQVELSLEAASLAQRNASLGISDSSAVSATRARALAEDAFFHPSVMSISYASIEHYFAIYMPFFAPVSLHVLLAVMKELKRYMVERRKYSAFLASQATSS

SEQ ID NO: 56507 - protein, 1176 aa, Oryza sativa
MPPPMLADAAAAAPYSSSSCSSNSSSSSSSSAIWSRRRDEITFDRLDKFWSALSPQARHELLRIDKQTLIEHARRNLYCSRCDGLLLESFTQMVMHGKLLQQKGPGVVQDDSWGGLSTTKDGLLTLLDCFINTNSLHVLQNIFDNARAREREREMLYPDACGGGERGWISPVIANYGRGHGTRDTCALHTARLSCDALVGYWFDLCEETRSSLLRMREEDFIERLMHRFDSKRFCRDCRRNVIREFKELKELKRLRREHHCTSWFCITDTAFRCEVFEDAVLVDCRQSFLDQDKSYNRFEFAVGTEKGKSDILGFEAVGMNGQVHRKGLDLDQFEDYFVTLRAHYADNKNTDFYVKAHALKGQSCVHRRLIVGDGFVTITKGESIQSFFEHAEEAEEEDEDDAMDRDGNDTDVDGVHPQKHAKSPELAREFLLDAAAVIFKEQVEKSLREATAQQNAHSVFVSLALKLLEERVHVACKEIITLEKQTKLLEEEEKEKREEEERRERRRTKEREKKLRRKERLKEKEKEKEKIPVQLKPYIGTSSSPLSNSATPINDQSPDIAHSKYSASDDEDKDSIVVTESFSPDTCVDQSLTRESDGQSNEFHCSTTLEFIPSDCNGSFMCEQSTSSRRKLRFRRDSLQEQTTGFWYEDCQDDTGGVGNIHWQSRERARNAGRGCNSLFSANNRTRERYEYNACSCGQQEDYGYFSPTARSSREMKMSRKTMVEKPWLQYRRCYPLDSFIVSKGSRVGSTPNKNAAPKQVWEPMDARKKASLGSSNGSSETVSGVDRSNQVGCSKDIVNCSQILGSEHEELAEASSDRSEEACKSITDQPCESSENNQAACNSEPPVVNKPDSCFTKDGGQTANMTSSDSSSCLSEGDRDSSMSSMTSLSAQNPESSSTSDSEGSSERNNSNPGNPPTKNGSRSLLEMCAGNGFREYQPQNIHPSDGNQFGFGVTPFQEQLLHQQKIHAAPYPSTLMGFHNHHMSVPTNGYLAYPQPGHFYPNAVGYGVAGNQCVDFPMQYSNVHPYAGPEFGYVPAQPVHKTPVNFNAMVPTAALFRNGAPEVINPVIVKPDRQHRHTLPPEPKRVDPDPQNGCSEDNKKPQDGSVPFSLFHFNLPISSPAQASSEDEVSGGCLASRSPTPSAQKAQPCSREETNIKEYNLFSARTGVEFPFF

SEQ ID NO: 56508 - protein, 84 aa, Oryza sativa; identical to SEQ ID NO: 47627

SEQ ID NO: 56509 - protein, 66 aa, Oryza sativa
MSKREGCLPSGSEGPSSPQPMTPCRPPHLIEASSSSAKAACTRQRSSDVLRSGHGVLHFAVTYMCS

SEQ ID NO: 56510 - protein, 663 aa, Oryza sativa
MAGAAALRRSARRVVLPGAYALSRALQHPERLLSSQASPDRGGVLGSELGLYPPERVRNFSIIAHVDHGKSTLADRLLELTGTIKKGHGQPQYLDKLQVERERGITVKAQTATMFYRHANNQLPASDQPDAPSYLLNLIDTPEHVDFSYEVSRSLAACQGALLVVNAAQGVQAQTIANFYLAFESNLSIIPVINKIDQPTADPDNVKAQLKRLFDIDPSEALLTSAKTGQGLSQVLPAVIERIPSPPGKCDSPVRMLLLDSYYDEYKGVICHVAVVDGALHKGDKIASAATGRTYEVLDVGIMHPELTPTGVLYTGQVGYVISGMRSTKEARIGDTLHQAKSIVEPLPGFKPARHMVFSGLYPADGSDSDALSHAIEKLTCNDASVSVTKETSTALGMGFRCGFLGLLHMDVFHQRLEQEHGAQVISTIPTVPYIFEYGDGSKVQVENPAALASNPGKRIAACWEPTVIATVIIPSEYVGPVIMLCSERRGEQQEYTFIDAQRALLKYRLPLREIIVDFYNELKSITSGYATFDYEDSEYQQSDLVKMDILLNGQPVDAMATIVHNQKAQRVGRELVDKLKKFIERQMFEITIQAAVGSKVIARETLSAMRKNVLAKCYGGDITRKKKLLEKQKEGKKRMKRVGSVDIPQEAFHELLKVSNSK

SEQ ID NO: 56511 - protein, 1003 aa, Oryza sativa
MILKVASLMMILILRSMNTKVLIGLKMVVLMVIMSVMELMLIVRVHCLITRLGFYGLMVSRRRKIDSVVVMDRSFLHGDIVASATDPTGQMGLVADVSLVVDLQGPHGEIIKGVSSKDLRRIREFNVGDYVVSGPWLGRVDEVLDNVNVLFDDGSVCKVARADPMRLRPALGPLNPNASCPFYPGQRVKAVNSSVYKTSRWLNGLWKASRLEGTVTKVETVAVIVYWIASAHFATNQESVPPEEQNPKDLTLLSCFSYANWQLTDWCLPNQYTSSCTDDSLIESSEIKDSDDIPESSDVKTELTQKTDMDENPGRMDGDSSADGSNMVYEDNTCLAKQSESGTIASTVPKEGSQDNATYRKKLRKVFVKKDKRTRRRDESFERALLIANTYTKVDVIWQDGTKECGASSTLLIPIHSPNDHEFFPEQYVVDKVGNDVDDSSETKRVGLVRSVNAKDRTASVSWFKPSLHPEEPREIECNEIVSAYELDGHPDYDYCYGDVVVRLPSVSLPVESTNRENTMELDNVNSTEVSATPVADAEEQFPQKESSLEFTSLSWAGNIVGFEDGDIIVIWGDGSVSKVGPHEIYVVGREDDGASLDDGTASDGASWETVDDNQTDLPDDSAQDDSQNVADSNIERENGSFNSQDGSSVATGPLSVAFGFVTRLASELFARESGDDIDKAEGENNVATSESTVVTTNDASGGKSVDVDMADKPGDSDGFKHFDVQQCPPDHHYLENMAQGTGGRKWVKKVQQEWNILEKNLPDYIYVRVFEDRMDLIRAVIIGASGTPYQDGLFFFDFHLPPEFPQVPPSAYYHSGGLRVNPNLYVDGKVCLSLLNTWTGRGNEVWDPSSSSILQVLVSLQGLVLNEKPYFNEAGYEKQVGTVEGEKNALPYNENTYLLSLKSMLYILRRPPMHFEDFAKSHFSKRGKYILKACEAYLQGNGVGTLTDDACTTERSKEQPCSVGFKLALAKIMPRLITALKDAGANCDQYEHLGKTETAQEH

SEQ ID NO: 56512 - protein, 310 aa, Oryza sativa
MTGEDTTRSPPPSPPAVFSMPSSSSESTQSSDSEVSAWDPQVLRAHAECLESEELAALSVNRTLLPILDNLLLQVYTMLRQKPLDYEQRTTLVHVFNNIANQIFGNGIFCGVLPVVTARVPIVNVIDRGTGIECDITVENKDGMTRSMIFKFISSLDPRFQILSYLVKFWAKIHDVNSPRERTLSSMSIVSLVAFHLQTRDPPILPPLSALLKDGSDFESVERNTLAFKGFGRTNKETVAELFVSLISKLLSAESLWEHGLCASNFEASWISKTWKKGIGNLNVSWEKGDAEDLQMSSRLCFELVRFHEG

SEQ ID NO: 56513 - protein, 343 aa, Oryza sativa
MFPPGNNSLALSAPRPGMELANIQQHPNQALGPGGKQRTSSLEAPIMLLTGHQSAVYCMKFNPAGTVIASGSHDKDIFLWYVHGDCKNYMVLRGHKNAVLDLQWTTDGTQIISASPDKTVRVWDVETGKQVKKMAEHSSFVNSCCPARKWPPLVVSGSDDGTAKLWDLRQRGAIQTLPDKYQITAVSFSEAADKVFTGGLDNDVKWWDLRKNEVTEYLKGHQDMITGMQLSPDGSYLLTNAMDNELKIWDLRPYAPENRNIKTLTGHQHNFEKNLLKCSWSPDNRKVTAGSADRMVYIWDTTSRRILYKLPGHNGSVNETAFHPTEPVIGSCGSDKQIYLGEL

SEQ ID NO: 56514 - protein, 178 aa, Oryza sativa
MDDHQSKVQRLYDACDAVFSSGSKAGLPTLKQIRWLQDLLDGMEAADVGIEGGGSGGERSSSSEDDDERSPPGRRFLSARAFTRITYVHIHECDDFSIGVFCFPAGATLPLHDHPQMVVLSKLLYGSMRVKSYDWANAPPCSGPRKSKHLSQLHANACACLPSIRSLMINRQKNSIVF

SEQ ID NO: 56515 - protein, 610 aa, Oryza sativa
MGRRGAQLQALVLSARKPHAVLKSPSARCCLEQEPGADMVPDGGEGHEIVEVAGEPGAPSSTMRLMDFIPIYIPTVETGALSRSVRKRRFLDFLRAHPSRDWFLRSTFVGRLRHRGQGQAASGDDEEVDSGGGRRRPRRRFRVPFVRKIKWGKLWSYAVSWCRKPENFAMIIWLAFVAAGLLMLFMLMTGMLDSAIPDDEQRKKWTEVINQILNALFTIMCLYQHPKIFHHVVLLLRWRPGAGADREEIRKVYCKDGAPRPHDRAHMLVVVVLLHATCLAQYFCCALFWSYARKERPDWALNIGYGLGTGCPVIAGLYAAYGPLGRKQHEDSDEESAAAQAGGGNRPAENDREVEIKIYNRRVVVSSPEWSGGLFDCCDDGTVCALSATCTFCVFGWNMERLGFGNMYVHAFTFILLCVAPFLIFSVTALNVHDDDIRDTVVSVGVLLGLCGFLYGGFWRTQMRKRYKLPASGCGCGCECGAGGQGHACRAAVSDCAKWLFCWSCALAQEVRTANFYDVEDDRFVFHGARNEDGRAVLVPLPREASTATAHSRSMSCPPKIDAVAALSGASPLGVQMAAINMERSATYSGEHHPAAMRPPVPPLMQMDQE

SEQ ID NO: 56516 - protein, 204 aa, Oryza sativa
MPVTQHLGSEGDGAQVQYEATLAYSGAVAGVTIEELAGRTSSWSSVSYVLDLGFVHPHHAAHACLLWERRAPCLPCPLQNIIATAARPHLPPHTRGLYISLTASLTTSICISCMSGCVPCCHSTKEVSATAFEDLNEAHSRRPEQGKVGELGHVPGSEDQGREARVAGRRRRGLQQYGIAPMSSWDLGSWGYCREDGASLCVDC

SEQ ID NO: 56517 - protein, 246 aa, Oryza sativa; identical to SEQ ID NO: 29576

SEQ ID NO: 56518 - protein, 234 aa, Oryza sativa
MYHPTRGGVRGGRDQFKWDDVKVDKHRENYLGHSIKAPVGRWQKGKDLFWYTKDKKSDSEDALKEEIRRVKEEEEQSMREALGLVPKRSSRPKGNRLDKHEYAELIKRGSTAEDLGAGHAEAAQVQGLGLYKGPRREEESSSFNLDPPEMVPAEQADNPPPETKPEREDSDDDRRSKRGREERGGEKERKRERHSEGKERRRDKQEKRSRHESDDRSKRHRKDKHKRRHDSDSD

SEQ ID NO: 56519 - protein, 72 aa, Oryza sativa; identical to SEQ ID NO: 33591

SEQ ID NO: 56520 - protein, 485 aa, Oryza sativa
MAAEPAAAEAMDVEAPARPTTTTSTVSTSKGKSPHDLLAETRASVEEVAARILAIKKDDAPRTELRELVAQMSLLLITLRQANREILMEEDRVKAETEAAKAPVDSTTLQLHNLLYEKNHYVKAIRACLDFQTKYPGIELVPTEEFHRAAPADIRDKTLAADASHDLMLKRLNFELVQRKELCKLHEKLEQRKSSLLDTIANQKKFLSSLPTHLKSLKKASLPVQQQLGMQHTKKLKQHHAAELLPTPLYIVYTQFLGQKEAFGENIEVEITGSTKDAQMFAQQQAKQENAGTLSNGDNRVDDDAIDDEEDAQRRRSRSRKSVVKEASNSVVAYQLHPLKVILHVYDTEESGAKRRKLMVLRFDYLAKLNVVCVGIEDSKGLDHDILCNLFPDDTGLELPHQMAKLYAGEVPNFSEKDSRPYKWAQHLAGIDFLPEEPLSVGDDSNRASRSADLSSGLALYRQQNRAQTILQRIRSRKVAQMALT

SEQ ID NO: 56521 - protein, 339 aa, Oryza sativa
MQQLLAMKLILTTLVVAVLALSAGTATATCDTLTVGHYRQSCRAAETIVRDTVKLYFSKDQTVTAPLLRLHFHDCFVRGCDGSVLLNATAASGPAEKDAMPNQSLDGFYVIDAAKAALEKECPGVVSCADILALAARDAVSMAAGNINGASLWQVPTGRLDGRVSSAAEAVANLPSSFADFAKLKEQFGSKGLNVQDLAILSGAHAIGNSHCVSFAKRLYNFTGKGDADPTLDRAYAAAVLRAACPPRFDNATTVEMVPGSSTTFDTDYYRLVASRRGLFHSDQALLQDREAAATVRVMARSSRQAFFRRFGVSMVRMGNVGVLTGAAGEIRKNCALIN

SEQ ID NO: 56522 - protein, 45 aa, Oryza sativa
MEGIVLHDLILGDVLPVFGWYLSFYFLWTDILRCLLLYSYHYSIV

SEQ ID NO: 56523 - protein, 325 aa, Oryza sativa; identical to SEQ ID NO: 33252

SEQ ID NO: 56524 - protein, 514 aa, Oryza sativa
MGRSKREVAPPPQALPASFPSGMWLATPPMQASFAPGGWQGTAAAPGGWQGMAPPQPPQAPLFAYGANTSAPHLAQMKQGSDRSSMDDSLSDLQESGMDSRPPGGFLSYFQDPSSLQNHQPSIPLNYYATQQAAPWAPSPAEYRSPVTKSGPGEQHPINIDSGGEETPTVRTEKRLTWTHEEDIRLVSAWLNNLNDSINGNFKKNDCYWGDVTTAYNSTTPRNRMRQEKQIKDRFHKIKKNVGRFCCAYKEVKSIYVSGQNELQLMEKVHATYEADYKEGQFTFLHCWKALRDQPKWHAYLEELEKPNKTKSDNEVEVRELTSTPNSPEDIIRPEGTKAAKARRNGKDKRKRKAKVYLSDMDDEIDKPKEVQNMADKGRDELLETQRRVSSENLESKRLAHLAAMEHKEAVMLETYRALMLQDTKDMPDDVRFEHVMALKSMREKLFPKTKVSKMLILAACFGSASAREATYYIIFSNPPILSKQNLCSNYLLSMSLYGSLLWPMNDVWIIVID

SEQ ID NO: 56525 - protein, 122 aa, Oryza sativa
MAGKLSIILKGQSSFMRPVTIRPSSSLASSADEHCGSRSLRRRKSGIWFSSMSMSRRMRLCADFLPAKSTRCAILDDTLLSSGFPPPPLAAASAAAKICKNSSRNAPSTTIIHASVSPLKSR

SEQ ID NO: 56526 - protein, 270 aa, Oryza sativa; identical to SEQ ID NO: 40478

SEQ ID NO: 56527 - protein, 233 aa, Oryza sativa
MLTSIRLETDLWLTLWAVTFTAVKKTISRLLLLVVSMGYGVVRPTLGGVTSKVGALGVVYFIASEGLELVENLGNINDFSGKTRLFLVLPVAILDATFIIWIFSSLSRTLEKLQLRRSMAKLELYRKFTNSLALSVLISIAWIGYELYFNATDPLSELWRRAWIIPAFWNVLSYVLLAIICILWSPSRNPTGFAYSEDTADEADEEGLSLVGSAVKGTGDIVNMHVFPEDKRA

SEQ ID NO: 56528 - protein, 448 aa, Oryza sativa
MPVSGKTASAIIRTLGGPALPADWQTGVGLPVDVGGVGPGPTLVNFTYQEDRKMGMIQDIFAIIKGYEEPDRYVILGNHRDAWTYGAVDPNSGTSALLDIARRLGIMLQSGWTPRRTIILCSWDAEEFGMIGSTEWVEENLEDLQSKAVAYLNVDCAVQGIGLFAGSTPQLDNLLVDVTRQVKDPDVEGKTVHDTWNKMTGGINIERLARTDSDFAPFLHHAGIPCMDLYYGKEFPGYHTALDSYHWMEKHGDPLFLRHVAIVEIWGLLAFRLADDPVLPFDYQTYASQLQEHANAFSSMMENSKWVHLLNRSIEDLSDAGLEFLKEAKKLQDQNISDGYSLMRRRLLNDRLLLAERSFLQADGLQGRGWFKHLMYSPPEDYESKLSFFPGVADAISRSSNRSAKEQQAAVRHEVRKISRAIQRAADVLRGEFSNRNESLYSSLSVAP

SEQ ID NO: 56529 - protein, 473 aa, Oryza sativa
MTVEELDANEKRAFLEWRRNLARLEENEKLVLTPFEKNIDIWRQLWRVLERSDLLVMVVDARDPLFYRCPDLEVYAQEIDEHKRTLLLVNKADLLPLNVRQRWAEYFKQHDILYLFWSAKAATADLEGKKLSSYSMENWNTADLDTKIYGRDELLVRLQGEAEYIVNQKGALRAEEGHESSRSDSVSTRPKHVVVGFVGYPNVGKSSTINALVGQKRTGVTSTPGKTKHFQTLVISEELILCDCPGLVFPSFSSSRHEMVACGVLPIDRMTKHRGAIQVVANRVPRNVLEQIYKITLPKPKAYEQLSRPPTAAELLRAYCTSRGHVSHAGLPDETRAARQILKDYLDGKIPHFELPPGDTDSETDPEETTDLEGSDTAVGATADHCASDEQDGEISQADPNISHVLSDLESFDLASEVSKNSTKKKKEASYKHHKKPQRKKDRSWRVGNDGADGSAVVRVFQKPAVNFATVTG

SEQ ID NO: 56530 - protein, 458 aa, Oryza sativa
MARFLLGAAAIALLAGVSSLLLMVPFAEAYDPLDPNGNITIKWDITQWTPDGYVAVVTIYNFQKYRHIQAPGWSLGWAWAKKEIIWSMAGGQATEQGDCSAFKANIPHCCKRDPRVVDLVPGAPYNMQFGNCCKGGVLTSWVQDPLNAVASFQITVGHSGTSNKTVKAPKNFTLKAPGPGYSCGLAQEVKPPTRFISLDGRRTTQAHVTWNVTCTYSQFVAQRAPTCCVSLSSFYNETIVNCPKCACGCQNKKPGSCVEGNSPYLASVVNGPGKGSLTPLVQCTPHMCPIRVHWHVKLNYRDYWRVKVTITNWNYRMNYSQWNLVVQHPNFENVSTVFSFNYKSLNPYGVINDTAMMWGVKYYNDLLMVAGPDGNVQSELLFRKDRSTFTFDKGWAFPRRIYFNGESCVMPSPDLYPWLPPSSTPRFRTVFLLMSFLVCGTLAFLHNHLVLDKNCGKC

SEQ ID NO: 56531 - protein, 255 aa, Oryza sativa
MGREERFPVWEAALLAGVAAAFATGLVGVYLSMPHSDYSFLKLPKNLQELQILTDHLEDYTSDYTVQVLVGYCAVYIFMQTFMIPGTIFMSLLAGALFGQLGGVALVVFAATAGASSCYFLSKLIGKPLVFSLWPDKLGFFQKQVAKRREKLLNYMLFLRVTPTLPNTFINLASPIVDVPYHIFFLATFIGLIPAAYVTVRAGIALGDLSSLSDLYDKQSIALLFLIGVVSVTPTLLGKNEKQQGKGPEMVASSS

SEQ ID NO: 56532 - protein, 339 aa, Oryza sativa
MVVFSAFWTVGTIFEASLAWTVMPKFGWRWLLALSAVPSFVLLLFYVITPESPRFLCMKGRVTEAMDVLEKMARLNNVQLPSGRLVSDKNIELDELSASESTTLLADAEEDDTIIEDKVSSFGGLSVAKLLSPKLIRATLLLWMTFFGNAFSYYGIVLLTSELSNGNRICAKEEVESIHSNDASLYKNVFISSFAEIPGSFLSAMIVDRIGRKLSMASMLFTSCVFLFPLIFSRTDILTRVSLFGARLCISASFTIVYIYAPEIYPTSVRTTGIGVASSVGRIGGILCPLVAVALVHSCQQTTAILLFELVIFLSGLAVSFFPFETKGCRLNDTEVVMN

SEQ ID NO: 56533 - protein, 191 aa, Oryza sativa
MAAQGIAEAVQAYTGLSPAAAVTILALMLATYLLVSSLFVAPDAAPPKPPPQRKEEEQQQQQEEEEAGAFVPYPDPVQVGEITLEQLAAYDGKDPAKPILIAIRGQVYDVTRGRLFYGPQGPYSLFAGRDATRALALMSFDPIDLTGDLDGLGPDELEVLQDWEDKFKERYPTVGHLASENAADGNHGGAA

SEQ ID NO: 56534 - protein, 276 aa, Oryza sativa
MHQLDRLCYAVVVLVVIGATVAEAATGTFIYAGCSPSKYQPGTPFEGNLNSLLASIANAAPNGGYNSFTAGSNGTGDGAAAYGLYQCRGDLGNADCAACVRDAVGQLNEVCAAAYAASLQLEGCYVRYDSSNFVGQPDNAMVYRKCSTSTSGDGDFLKNRDAVLAALQGGLANGYKVSSSGNVQGVSQCLGDLAAGDCTTCLAQAVGQLKGTCGTSLAADVYLAQCYVRYWANGFYFRPSQDYSQDDVGRTVAIIVGILAGLAILVVFISFLRKSC

SEQ ID NO: 56535 - protein, 268 aa, Oryza sativa
MTVSSPSAEEPFRVFVGYDPREDEAYEVCRRSLLRHASIPVDVRPIRQPDLRAAGLYWRERGPTESTEFSFTRFLTPYLAGYRGWALFVDCDFLYLADIAGLLACLPSSDPDHRLAVACVKHEYAPAEATKMDGAIQTVYPRKNWSSMVLYNCGHPKNVAALTPDAVSTQTGAFLHRFAWLDDDEIGEIPFAWNFLVGHNKVDPADPSTQPKAIHYTSGGPWFERYRNCDFAELWIKEADELKADKEKQKQQQIVMANGEKEKDEEGN

SEQ ID NO: 56536 - protein, 594 aa, Oryza sativa
MSVEAVKQIVPAHLVKPAVDPVHAKASKAGKDGRSDLIAKEILEEQKPAHRRQESSESILDKGPSNVGSDSGVLDVPLTPKGDSGELKEIQGLDCNGNQEKKTAQKSSTSESFASAKVSDGTNGLRKTCGSGKVSDTADSTESGKSSMCRPSTSSNVSDESSCSSLSSSTTKPHKGSDSRWEAIRMIRSKDGILGLSHFRLLKKLGCGDIGSVYLSELSGTRSYFAMKVMDKGSLASRKKLLRAQTEREILQSLDHPFLPTLYTHFETDKFSCLVMEFCPGGDLHTLRQRQPGKHFSEQAAKFYVAEVLLALEYLHMLGIIYRDLKPENVLVREDGHIMLSDFDLSLRCAVSPTVVKSANPGPDALQRNNQAYCVQPACIQPSCIQPSCVAPTTCFGPRFFSSKSKSKSKKEKKSKPEVVNQISPLPELIAEPTDARSMSFVGTHEYLAPEIIKGEGHGSAVDWWTFGIFLYELLFGKTPFKGSGNRATLFNVVGQPLRFPESPMVSFSARDLIRGLLVKDPQHRLAYKRGATEIKQHPFFEGVNWALIRCASPPEIPKPVELERPPKPAPATEKVAPAANQKGSDNYLEFEFF

SEQ ID NO: 56537 - protein, 153 aa, Oryza sativa; identical to SEQ ID NO: 41419

SEQ ID NO: 56538 - protein, 257 aa, Oryza sativa
MEIRDQTETNLINLRRTIYSTIMSSVDFEEAGHKLLKIKLEPGQEMELCIMLLECCSQERTYLRYYGLLGQRFCMINKVYQDNFEKCFVQQYSMIHRLETNKLRNVAKFFAHLLGTDALPWHVLAYIRLTEEDTTSSSRIFIKILFQELSEHLGIRLLNERLNDPNMQDSFDSIFPKDHPKNTRFSINFFTSIGLGGITETLREYLKNMPRLIMQKQKPASSESDSSDSGSGSDSYSSESESSSDESDRKRNKRRKK

SEQ ID NO: 56539 - protein, 424 aa, Oryza sativa
MVTVSQSSDVEAILRSILEQVMPQSKDGQELQGGHASQKKLLHQAVISYLHPLMPKALRRRSSSNSNSDNSKIREGKLTRLPRALTLDRQYDHDPQDGNDAAAGSSETVVTTPATKGTATSDEKPTSVIATIRGAFRPWDRRRHPPQDDKGGSTSGSGKEAINIQTMNKPGEKNIQTMKRDGLSKLLQEHLNQKRYFLLIDDVWSATTWEQIRKHLPTDNLSYRIIVTTRFQAVATACKRKESDRIHKVDVLRGKKPEKLFNEVESESRISKDGERKEIDDGEQKEREGQQKEIDGEQKDIVRPRRIWEMCSGLPLAIVTMAGHVACNSDKDETHWLNVCKSLVPESGRDMTQEGVTRILGHCYNDMPAELRTCSLYLSIFPKGNKISRKRLTRRWIAEGFVSEKQGQSVEDVAEACFCWKYSH

SEQ ID NO: 56540 - protein, 331 aa, Oryza sativa
MEARGSRGMRLWLLSVAVMAMAMATRSQAQLQVGYYDTLCPAAEIIVQEEVSKAVSGNPGMAAGLVRLHFHDCFVRGCDASVLLDSTQGNRAEKDAPPNTSLRGFEVIDSAKSRLETACFGVVSCADVLAFAARDALALVGGNAYQVPGGRRDGNVSVAQETNGNLPPPSANVAQLNQMFGAKGLTQAEMVALSGAHTIGVSHCSSFSNRLYSSGPNAGQDPSMDPSYVAALTTQCPQQQGQPAAGMVPMDAVTPNAFDTNYYAAIVANRGLLSSDQALLADQTTAAQVVGYTNNPDSFQTDFAAAMVKMGSIGVLTGNAGTIRTNCRVAS

SEQ ID NO: 56541 - protein, 397 aa, Oryza sativa
MLTCIACSKQLAGGAPPLREQSDDADDAAVARGAGECATPSTRQAIKALTAQIKDMALKASGAYRHCKPCAGSSSSSPAAGARRHHPYHAYADSGSDRFHYAYRRAGSGGDATPSVSARTDFLAGDEEEEEEEEEEEGTTADGSEDDEAKEWVAQVEPGVLITFLSLPEGGNDLKRIRFSREIFNKWQAQRWWAENYEKVMELYNVQRFNQQTPLPTTPKSEDESLKEDIPATPPLNSERLPHTLHRSLTGGRTTGYGQPDSLGHQHNLGNGHRQQHHHCYTGHQCYGSVGLASTPKLSSISGAKTETSSMDASMRSSSSPEEVDRSRELSVSVSNASDQEREWVEEDEPGVYITIRALPGGIRELRRVRFSREKFSEMHARLWWEENRARIHDQYL

SEQ ID NO: 56542 - protein, 1315 aa, Oryza sativa
MVPAGGGGGELERRVMAALKASEARGDQPLVWAVEVARVVAGEGAGLPSADLAGILVSNLCFAHNSPSLWKLVGHAVASRLLCPLHVLALLTPRVLQQRRAQPEAYRLYLELLRSNVTSSFLSMEAGPNRDKITKSIDDALQLSKIYGFSGIDNGHVIIFFMMFVITKLIDCTLEDCGFPSGLTEEQGSIYAIEGPQDMDLDVKGVSTEKQNEQRAQLRRKNTVMALDVLIMMVADRKIQSFLRLIFLNMPEKFSVLSQRLSLVEAHKMELETLLTANHKIDDLLMNMWRVSNTAYQPNNKRLLGVLGNMKYGGSMLGQFTGAGRAACWVIFDIYVENAIDGKHLSAISAIEVLKEMTKTLQAINEASWQETFKALWISALRLVQRAREPLEGPIPHLDSRLCMLLALIPLSIGAILKEETDVHGAQGSKSLPKTSGLVSSLQDLIQYSGLLVPPSSVVNAANAAASKAAAFKANYKSGGGNPGMMGQNDSSTKTVGNMLHLIVEACISRNLIDTSSYLWPGYVVSSGHLKDATLPQESPWLNFMQGAPLSGPLIDALIATPASSTTELDRLYHIALNGSEEEKSAAAKILCGASFVCGWNIQEYVVRMVVKLLSPPLPSNSSTQGSMSHYLAQMSTLNALLLGISYGDAIHIISLYGMVPDVAAALMPICEVFGSIPPPSNHKPAIVGEISVYSVFSCAFLCLLRLWKFYKPPQEYCLAGRGGSVRLELTLDYLLLMRNNHIDFANSSASSRNSSNNISPLNEVPAQPLYIDSFPKLRAWYFQNQACIASTLSGLCNKNPVHQVANKILSMICRKMNKPVVSSGNPSSTSSSSVSGSSVSTPDDYQRPTVPAWEFLEAVPFVLEAVLTACAHGRFSSRDLTTSLRDLVDFLPASIAAIVSYFLAEITRGIWKMVPMNGTEWPSPGASLHSIEAEIKEILASAGIQIPSCYPRGVPPMLPLPMAALVSLTITFKLDKSSEYIHAISGQALENCAGGSSWPSMPIIAALWTQKVRRWHDFIILSCLRSPFGRDKDAVAQLIQSCFSSFLRSSCSGSDFTANRGVGALMGDAITGQGLQLPMAPGFIYLRTCRTFHDTYFVSEVILKQVIEWADKLANGFSSSGPPQLKSGRTPLSSAACMAHQVAMLGGGLLCVAGGPLLVQVLYEETLPTLLLSAREESMKDPGPVSSTLQGYAMANMLFFCGSLLWGAERTSPVMKLSFLSRRPRVVGNHMDFMAGVLDGHILLGCDHGTWKAYVSRFVFLVVKFVPSWLRDIKLDTLKKIASGLRSWNEHDLALALLERGGPQAISTVVDTLL

SEQ ID NO: 56543 - protein, 39 aa, Oryza sativa
MNGRSNLQWRIMDHRIGLSSRAIYDYMHSIIDAIMQVCN

SEQ ID NO: 56544 - protein, 758 aa, Oryza sativa
MFFGFSSGGHGRDYGWIKQGMIFPFVDYLDRFQGQALYKLKANRFRQAIEEAFLAERGFCELEMDEGCSLEKSVNDQSVPDGLQEGSGSNNDQECQSEAQVVGKSTGCCDSCGNRVPPKIAKKKKQAGEQLLCRHCDKLLQSKQYCGICKKIWHHTDGGNWVCCDECQIWVHVECDLTCINMEDLENADYFCPDCKSKRQTVPPVEQMNTPNSSECASTSKEKLPEMIPVFCFGMDGMYLPKKHMILCQCNSCKERLMSLSEWERHTGSRKKNWKMSVKLKSNGDPLVTLLDDIPCANVKSSTPSINKEELLKLLANSFRPVNARWTTERCAVCRWVEDWDYNKIIICNRCQIAVHQECYGARDVQDFTNWVCRACELPKQKRECCLCPVKGGALKPTDIDQLWVHVTCAWFQPKVSFPVDETMEPAMGILSIPSEYFKKACVICKQMHGACTQCYKCSTYYHAMCASRAGYRMELQYSEKNGRNITRMVSYCAFHSTPDPDNVLIVKTPEGVFSTKFLPQNNEKQSGTRLVRKENLQEKVLPAKISDCPAARCLPYEMLKNKKEPGEAIAHRIMGPRHHSQESIEGLNACMDQKDEKSFATFRERLRYLQKIENKRVSCGRSGIHGWGLFAAKKIQEGQMVIEYRGDQVRRSVADLREARYHREKKDCYLFKISEDVVVDATEKGNIARLINHSCMPNCYARIMSVGDEKSQIILIAKRDVSAGEELTYDYLFDPDESEDCRVPCLCKALNCRGYMN

SEQ ID NO: 56545 - protein, 827 aa, Oryza sativa
MEPKEAPPPPPPQSPSSTEEEGMLSVTAAMARDAAVLFQSRRYADCAEVLAQLLLKKEGDPKVLHNMAIAESFLDGCPDPKKLLEILGNVKRRSEELACASRQQTDSANGTGNSVSSGSRGSGIIPLISAANNATTYGDEFDTTIITFNTAVILYHLHDYESALSILDPLYRNIEPIDETTALHVCFLLLDITLALQDASNAADIIQYLERSFGVVSATNQNENANTAQQQSAQPKPSAKISTPPDSDSNTCAGGSENLSAGNFSDDTLEFESFYSTLDGGNQNLGRPILNDFSRASADLAATAADLKVRLQIYKVRLLLLTRNLKVAKRELKVLMNMARGRDSSTELLLKSQLEYARGNYRKAVKLLSTPNNRSEQAMLAMFYNNLGCILHQQRSIQTSVWCFSKALKYSLSLRSEKPCKLTAISQDKSCLISYNCGIQHLMCGKPLLAARCFREAMPLLCNRSLFWLRFAECSLLALEKGILTSSGATSCNDEIEVDVMGSGKWRHLVINPVKPSHSSESGEEVSLDKYGNLISLRFARQCLLNAQILLDPSTKENLVIASGTEESNQTSLQGQKGSGQKNTTNTDSKPPGPALTNANGEQKGISNLNVTLQSSLALYDDICRKENLKIKQAILGDLAFIELCLQNHLKALSIAKLLQQLPECSRMYVFLSHVYAAEALCALNRPKEAAEQLTVYLRDGDDIELPYSIENCEKALVEKDSDGEDSVAPVVTKLSSGESQYSESLKPEEAQGVLYIDLGMTAAVQGELEQANYMVSRGVALLPNNPRAVLASVYVDLLQGKAQEAIAKLRRCRTVRFRRHSVAVSS

SEQ ID NO: 56546 - protein, 1135 aa, Oryza sativa
MHCSKSTWYLTTPVSLPVSAETAKQVKILTRCPRRLANGTLGSWRRGVKIRCSGALLVTPLVYLASLQPPWRWLLLASCCCCCPSSCPSSCTSWQCEEQTEKTPQRCSLSRPWRWATGGGNGVLASWNGSAGPCSWEGVACGRHGRVVALSLPGHDLSGTLSPAVGNLTSLRKLDLSYNWLHGGIPASLGQLHRLRELDLSFNTFSGEVPSNLTSCTSLEYLALGSNKLAGHIPSELGNTLTQLQVLGLDNNSFVGHWPASLANLTSLGYLSLRMNSLEGTIPPEFGSNMPRLYFLDICSNNLSGALPSSLYNLSSLMGFDAGNNKLDGSIATDIDEKFPHLQSFAVFNNQFSGEIPSSFSNLTNLTSLQLSMNGFSGFVPHNLGRLNALQNLQLGVNMLEAGDIKGWEFVESLTNCSKLEILVLSNNNFTGQFPISIANLSKTLQKLYLGGSRISGSIPSDFGNLVGLRSLYLFSTDISGVIPESIGKLENLTTLYLNNNSLSGHVPSSVGNLTNLMKLFMQGNNLEGPIPANLGKLKSLNVLDLSRNHFNGSIPKEILELPSISQYLNLSYNSLSGPLPSEVGSLTSLNELILSGNQLSGQIPSSIKNCIVLTVLLLDSNSFQGTIPVFLGDIKGLRVLNLTMNKFSGVIPDALGSIHNLQELYLAYNNLSGPIPAVLQNLTSLSMLDLSFNDLQGEVPKEGIFKNLSYLSLAGNSELCGGISHLNLPPCSMHAVRKRSKGWLRSLKIALASIAVVLFLALVMVIIMLIRRRKPVHRKKGQSLTPVVEEQFERVSYQELSNGTKGFSQNSLLGKGSYGVVYKCTLFDEEIVVAVKVFNLERSGSTRSFLAECDALRSVRHRCLLKIITCCSSINNQGQDFKALVFEFMPNGSLNGWLHPKSDMPIADNTLSLTQRLDIAVDIVDALEYLHIHCQPPIVHCDLKPSNILLAEDMSARVGDFGISRILTESASKTQQNSSNTIGIRGSIGYVAPEYGEGSAVSTLGDVYSLGILLLEMFTGMSPTDDMFRDSLDLHSFSEAAHPDRILEIADPTLWVHVDAEDSITRSRMQECLISVIGLGLSCSKHQPKERMPIQDAALKMHAIRDDAYLMFSGSLSVDMEEETKQISSDLKQQ

SEQ ID NO: 56547 - protein, 130 aa, Oryza sativa
MNKDKVHDKETHRTSNDISHKTSVDKVKAPNLFERAKEEVEALVGAVHDKMEHNSSPHGNNADLHKDSKDESKVSMNKIETHKNETHGTSDDINENTPVERVKGPNVFERAKEEIEAIVEAFHPKKGSDK

SEQ ID NO: 56548 - protein, 467 aa, Oryza sativa
MQHARNRALREEVYRAYLTRASSGDLDNTNIISQILKLRLEKAKLLGYKNYAEVSMAQKMATVDRVEELLEKLRAASWDHAVKDMEDLKAFAKESASPEANDLAHWDLSFWSERLRESKYDINEEDLRPYFALPKVMDGLFSLANRLFGVSVEPADGLAPVWNSDVKFYCVKDSSNSPVAYFYFDPYSRPSEKRGGAWMNVVFSRSRVLARNGSPVRLPVAHMVCNQTPPVGDKPSLMTFREVETVFHEFGHALQHMLTKQDEGFVSGIRGVEWDAVELPSQFMENWCYHKNTLLSIAKHYETGELLPEEIYAKLVAAKNFRAGTFSLRQIRFASVDMELHTTYDPNGSLSIYDVDRRVAERTQVLAPLPEDKFLCSFSHIFAGGYAAGYYSYKWAEVLSADAFSAFEDVGLDNEKAIEETGRRFRETVLALGGGKSPLEVFVSFRGREPSPEALLRHNGLLPVAAL

SEQ ID NO: 56549 - protein, 912 aa, Oryza sativa
MSAFRVYFSEGEIMENESGVNLSNFRQCTLYHPNPDTLTMPEVWYWLTCTFSLDPGIYSVNVRVMWSRSANNIRWELKNVTRSKAWQDWLAGCRRRGYEYVMLVQACQGRVPTESAAGQSSNREELGSSSHEEDEVVAPHHGGDVGPDIQNLSIQGDEVVNRHPTGEADEGEDIPAIVEEIERVDRHAIEDEENLAAEENDDEDEQEVEEVPMPASWNLEDPGYIAENSCHDSIWFYGDGQINLGAMFRDKTGLQDAVKSWSFKTQRQFRVVKSNKTEYTVVFRLHGHVPKYESYWILSKLQEHSCLIRNTRESHRNLTAAYVANKYYKEIIEGDDLPVRHIIKLVEKGEQYTISYHKAWRAKQKAMEKRYGTFEEAYDTLSQMLNILKIRNPRTYVAVQDRESIRPPNYLVMQRAFFAFGACILAFQCSRPVPCVDGTFLTGKYRGQILTAVGADANNQIIPVAFAFVESENYESWLWFLQHLKWGVVQKRTSICIIHDRNAGLLKAIKELQEDGDGAYYWPDMHSRWCMRHMGANFFKQFNNRRLMNMFKRLCKANQSTKFDELWKQLDEVTRTHIRSKQTNINLLDVHVPQALEPMDDLIPSNGKKRRSSKNIKCFTHWIECEPNDKWALLHDTNGARHGIMTTNLAEAYNVVLSKLRPLPLTAIVEGIMHRTTMWMRTRRAAALQQMSNAQTPFCKKMAEYLQEKANKARFHTVITTGNVRRRWEVTCRTKGDFGSSTGVITHEVTLGHESDNTCSCSCNKPKLLHKPCSHVLAACAKIKLDSTSYVSTFYLKDRVLNAWSAEILGWRSLQHLVETGGDNRIYVPDLDLLKAGKGRRQTRRLRNDMDASEAGGPVRRCENCLQYGHRTRDCKNNKEGTSSTMEPMQQRARRNRRGSQGAHDREEGNLQ

SEQ ID NO: 56550 - protein, 328 aa, Oryza sativa
MPPAKSSKHGFPKLSASSKALVLLPLLLLGFIYLFVYPKEFELQALMMSSCGPTTAAGAYTAAPRRLAGEPPASRKPDFRLLIGVLTRADNYERRHLLRMVYGLQLAAGDLTAHVDVRFVFCRLYKDDQRVLVPLEILRHGDIIVLDECEENLNGGKTYAFFSAAARLYADDPYDYVMKADDDIFLRLPRLLASLGAMPREDAYYGATIPCGSMDPFREYMSGMAYALSWDVVEWVATSDVPRNRTVGPEDRMTGQWLRLGGRGKNRFNAKPAMYDYPLPAPVDKCSHEFIPDTIAVHRLKDNPRWAETLKYFNFTKGLEPSKFYKIN

SEQ ID NO: 56551 - protein, 164 aa, Oryza sativa
MKFPTRPPTVPMAPATATAVASPSTSSRLLHRSLLSPTPTAARCLRPPLCRGRLRTVRQVVANGDVSSPSSDVAAEESAAAPKIGKRVRVTAPVRVHHVSKAPDLDICGMEGVVKQYVGIWKGKRITANLPFKVEFELRVDGQDKPVRFFAHLREDEFELVEDE

SEQ ID NO: 56552 - protein, 273 aa, Oryza sativa
MSPEKSPESSVVREQRVTISNKHGENLVGLLHQACSKNLVILCHGFRATKDDSILVDLAYALTREGVSAFRFDFAGNGESEGQFQYGNYRREADDLHSVVSYFTEQEYNIIGLVGHSKGGNAVLLYASMNHDIPVIVNISGRFALERGIDGRLGKNFMQRIKKDGYIDVRNRKGEFEYQVTEESLKDRLSTDTLLSSRSISKCCRVLTIHGSKDEIVPVEDALMFAANIPNHELHIIAEANHRYTGHEKELKAFVLDFIKSQPNFSSSLRPKL

SEQ ID NO: 56553 - protein, 336 aa, Oryza sativa
MDALPDAADAAQLAAAAAPPQKRDEWSESGIVRLLEAYEAKWLLRNRAKLKWSDWVDIAHEVSAHCAMENAAATGKPGSSTAKTPNQCKNKIESMKKRYRAESAAAARAGPAAAGAGPSWRFFARMDGLLKGPAGSGQPQAELSNSIDLRAPPPAKVEVDVDADFVSQLADAGPGALSELVSAYANGSIQEKLDKVENSGHVEGRAAESDVNVSSPRIKEANEDAEEVDKVWDMSKKRKNTEFDIAKSIELLASSFLKIERARMDLYRETERMRVEAEIKKGEMELKRTEIMAKTHLQIAKLFAKRLKECSSKTGGSSSVTAEVDNHAKKGENGSG

SEQ ID NO: 56554 - protein, 605 aa, Oryza sativa
MKFMKLGSNPDTFQDDGNEVSIVATELVSDVTVRIGTTKFYLHKFPLLSKCARFQKMIPTTGDENIEIHIHDIPGGAKAFEICAKFCYGMIVTLNAYNVIAARCAAEYLEMHETVDKGNLIYKIEVFLSSSIFRSWKDSIIVLGTTKAHLPWSEDFKLVSHCIDSIASKASTDTSKVEWSYSYNRKKLPTENGLDLEWNGVKKQQFVPHDWWVEDLADLDIDSYKQVITAIKTKGMVPKDVIGEAIKAYTYKKLPSLSKVSMVHGDAKVRAMLVTITCLLPSEKGSVSCSFLLKLLKATNLLKCGELCRKELMKRIGRQLDEASVSDLLIPTVDGETTVYDIDMILSIVEEFVRQDSKNAQKHNGGEVDSHVQAPSASMIKVAKVVDGYLAEVAKDPNTPILKFIHLAETMSINSRPVHDGLYRAIDMYLKEHPSLGKNEKKKLCSLMDCKKLSPDACAHAVQNERLPLRTVVQVLYHEQTRASAAVTIRADSICVGSYESSRSGATTNTEDEWDGVMVVEDLSLSTKTTTKLDGAANSHCSNGKAKKGGASTPKKAAHRRTTTVPTGKGQSGERSSSDSSDSAILQKLELPKRTPSRSTKPAAV

SEQ ID NO: 56555 - protein, 504 aa, Oryza sativa
MDAGSHSISSEKSSRYVAPRQPLQEAGSRPYMPSLSTASRNPSAKCYGDRFIPDRSAMDMDMAHYLLTEPRKDKENAAASPAKEAYRKLLAEKILNNRTRILSFRNKPPEPESILTELRADAASIQAKPAKQRRYIPQSAERTLDAPELVDDYYLNLLDWGSSNVLSIALGNSVYLWDATNSSTSELVTVDEDNGPVTSVSWAPDGRHIAVGLNSSDVQLWDTSSNRLLRTMRGVHDSRVGSLAWNNNILTTGGMDGKIVNNDVRIRNHVVQTYQGHQQEVCGLKWSGSGQQLASGGNDNLLHIWDVSMASSMPSAGRTQWLHRLEDHLAAVKALAWCPFQSNLLASGGGGSDRCIKFWNTHTGACLNSIDTGSQVCSLVWNKNERELLSSHGFAQNQLTLWKYPSMVKMAELTGHTSRVLFTAQVIFCSLYLPFKLTNIALNRLLITCLVVILQSPDGLTVASAAADETLRFWNVFGAPEAPKTATKGSHTGMFNNSNHIHIR

SEQ ID NO: 56556 - protein, 289 aa, Oryza sativa; identical to SEQ ID NO: 35356

SEQ ID NO: 56557 - protein, 426 aa, Oryza sativa
MPAALVACSGKRRRRTATTHAARDSSSWAFLAEDLVSLIGWRVLAGDVRDYICFRAACHHWRSCTASPCGRGVVDPRFHPRRWMMLPEGNGLYPGHGMLRGFVRFFNLSTGAFVRLKLPIVRDHRILDSVDGILLLQRNRDTAVRLLHPFTGDIVDFPPLDTLLPYMGRRSEEYLRDVAAASITSSADDQAVLLMIWLFRTVRVAFAASGDKQWRVSSWSMYQAYTPLPFQGKLYILDQATAYGGPEVLQIDPPLQLQLEGTTELSLPPPKSIAKCPARTPDSFFLYHLVECDSDILLVTFGVSVYAQISVYRLADLISGTTVPVTCIGSNSLFLGNRNLCVSSKAFPTIVGDAIVFYHQKENYLAQYHLRSGTLSPTSDGCIFATNMPSPSSIIHHIYTCCFRTQWTKGHLLFQRENRAWQMKRK

SEQ ID NO: 56558 - protein, 186 aa, Oryza sativa
MPQGDHIELHKKRHGRRLDYEERKRKRAAREVHKRSRDARQLLGAKGKRFAKKRYAEKAQMKKTLKMHDESTSRQKVDDVQEGALPPYLLDRDQTQRAKVLSNTIKQKRMEKAGKWEVPCQRSDLWLKKKCSKFYELAREKPNSGREWSLRPPLLDLGLQGNHQSMNGLLGQLAFVSQRPMLLTLS

SEQ ID NO: 56559 - protein, 627 aa, Oryza sativa; identical to SEQ ID NO: 54730

SEQ ID NO: 56560 - protein, 168 aa, Oryza sativa
MTMPKMKHMHMCSTITVRMIALMISLTVLMPFPMKLLGFLIRTTSTCTKRRNLSIRKSCPALVQKVRFQLSLFIVTTSSLVNNRYMFLLSPQKQFILRSWSTMRASQHTTTITATMIQICWDIHMTYSCPMNMCQMNHLNQLSLLGLCIRDTISPAQMGHLLNSKIIL

SEQ ID NO: 56561 - protein, 78 aa, Oryza sativa
MYVYCLKGQFRPMCWILPNPTLAMNIKVQRKKCFCFTVIQQVVCEVQIISAGFCFNVYLTNHNIQLDNFDKIEKNNMF

SEQ ID NO: 56562 - protein, 476 aa, Oryza sativa
MAPPPSPPHAAALPAWAAENALFRRHRRLRPLLLPAASLRAFAPLLSHCIVSGLARNPFVASRLLVASSRLSLRFSLLLLSHLPASSLSPFSFNSLIRASPPRLALQLFDQMRHRGVTTDRYTLPFLIHACSSGDRPLCESLHGQSLRLGYSSVLFTQTALMNAYFACRFEVAARRVFDEMQAKDVVAWTGMVSGYVDSGMFLRGVEVFQEMRSCEEAVRPNVATVVSVASACAGLGSLEYAKGLHAYVEKVGLEGELIVKNSLIDMYGKCGSIELARGLFGLMPQKDLHSWTAMISGLASHGHGKEAVALFFSMKEAGVLPDSTTFVVVLSACSHAGLVDEGISIFNSMENEYKVTPDIKHYGCMVDLFSRAGLIARGYQFIESMPFEPNLAILGALLSACSINNELDIGELVIKRIESVRSDKGGAGVLLSNIYANQNLWHEVDSLRRKIRDDTICRKPPGQSVITSDVSFMAS

SEQ ID NO: 56563 - protein, 375 aa, Oryza sativa
MADGQEDAAGLDDDLVLEDELRGREEGEDGGGGGGEEEEEDDVDGLASFLESEILSGSSGDDPTGREEGDEKEKQLGDDAKNNKRKQESESDGDSGSGEEQNKRVRRAKGKEKDVASVAPQIDSGMFCNIPPELFLQIFKFLSSEDLISCALVCRFMNVVASDETLWRRLYCMRWGLSCNTKLRECAWKKLYIQQDREDMVEFVRNTPTEFKEYYIQMQASKRSQAPLPSEVNDDKVILDKTIADQVSSWKSSRGLTGDAVKGHSCSGNTCSYTQIGDAYICEKTGRVHVCDDACREFVLDQSSGLLLCTISGHCFERWLCPDDEWDADDDTDLQQAGMTDEAEPFMGSGRFARAYQLGYSCADEKELEYALRFC

SEQ ID NO: 56564 - protein, 457 aa, Oryza sativa
MGAPSREDEEAKKMEAGGDTVGQKLDAGALFVLQSKGSWLHCGYHLTTSIVAPPLLSLPFAFASLGWAAGLICLVIGAAVTFYPYNLISLVLEHHAQQGRRQLRFRDMATDILGPGWGRFYIGPIQFLVCFGAVVACTLLAGQSMEAIYLIANPGGTIKLYVFVAIFGVFMMILAQMPSFHSLRHVNLISLVLCLAYSFCAVAACIYLGSSKGAPEKDYSIAGANTRDRVFGVFNAIAVIATTYGNGIIPEIQATVAAPVTGKMFKGLCLCYAVVVTTFFSVAISGYWAFGNQSQGTLLSNFMVGGRAVIPEWLLLIIELFTLLQLSAVAVVYLQPTNEVLEGLLSDPKAGQYAARNVAPRVLSRTAAVALGTTIAAMVPFFGDMNALIGAFGFLPLDFAVPAVFYNVTFKPSKKGAVFWLNTTIAVVFSALAVVASVAAVRQIILDANSYKLFANV

SEQ ID NO: 56565 - protein, 195 aa, Oryza sativa; identical to SEQ ID NO: 35317

SEQ ID NO: 56566 - protein, 1005 aa, Oryza sativa
MFRSGSAPPTIEGSLNAISGLLRGGGEAAVTVAAIPDAETLNGHGGLLSEDELRADPAYLSYYYSHGNLNPRLPPPVLSKEDWRSTQRLKAGVVGGIGDGRKVSPEETGHEPTVGRPVFSQNVGFDQEEAARNDVGGAAEWVDGGGDGLIGLSLGRQRSFADILQDNIGRRTPASEHPSRAVSRNSFLDNQELLNSADSQYSMHNDILEAQRAVGNVQNVSGLPSINASASQTFASVLGSSISRNATPDSHYVPRVPSPGLPPVGVRINSNEKKLNCSSSFNTASSKAVEPDDILAAISNMNMSKDGTLGDSNSISQSKFQSEISDHQNISLDPKALQVNKNQHSLMLEADTDYLGIPPISQPSNPSFSDINKNVSGLANIRNSTNTRIDGHAEMQRSSTLSTRSYQKSPTSSNASPGGSPAQHQNIDNINSAFLNYGLGGYPLSPGLPSMMMNCMGSGNMPPLFESAAAASAIASFGADSRNLGNNILSSPTLSLSDVHNLGRTGNQTATGLLSPLSDPFYVQYLKATQYAAQGTANCSDPSLERGFMGSQYGDLTAVQKAYIEALLQQQKQYGMPLGKSTTSNHGYYGNLAFGMGMAYPGSPLGSPVASPSGPGSPLRLSERNMRFPSNLRNLGGWNSDPSGYMNDNFPSSLLDEFKSNKARSFELAEIASHVVEFSADQYGSRFIQQKLETATVEEKDMVFKEIMPQALSLMTDVFGNYVVQKFFEHGSAAQRRELADQLFGHVLALSLQMYGCRVIQKAIEVVDLDQKTKMVTELDGHIMRCVRDQNGNHVIQKCIECVPEDSIQFIISTFYGQVVPLSTHPYGCRVIQRVLEHCTDPKTQEIVMDEILQSVCMLAQDQYGNYVVQHVLEHGKPHERSVIIEKLAGQIIQMSQQKFASNVVEKCLTFGGPAEREVLINEMLGTTDENEPLQAMMKDQFGNYVVQKVLETCDDQQRELILSRVKVHLSALKKYTYGKHIVARVEKLVAAGERRIGLQAQYPS

SEQ ID NO: 56567 - protein, 215 aa, Oryza sativa
MESSSSAAAAVDGEDGGGSKRSWYAVGERAVLVPYLREHVPRYHGWMKDPALLEATASEPLSLDQEFDVHRSWTLDPLKHTFMVLDKDLIEGGFAVGDPHTEAMVGDVNIYMNDPDDLQLAEIEIMIAEHKSTFCYSRGKGLGQEAILIMMAFAVEKYGIHTFRAKVNESNTASLKLFRKLGFKDASYSSVFKEVTLEAPATALPLVSPLTIGNW

SEQ ID NO: 56568 - protein, 455 aa, Oryza sativa
MWRLIQIKCFIRHLLLFTPGRDRRRGGDGGGGHGGERAAGEEAAAVGFWARRSGACFVLAIRRSIEGGRPAGRASGSTPTAMALLMDPGAGGPLTESEKADLDAIAAIKESAAAEYKEKGNRLVKMGRSHYADAVDCYTKAIAQMEPLPPPPVPSPDASVLFANRAHVNLLLGNHRRALDDAARAVQLSPSNVKAYYRAAKAAIALGLLPEAAAFCRRGIEQDPANEELKKLLAQVDAQQSEQDRHRAKVAQAVSAAKDIVAAVEKRGLKLGKAAYQELTGVKKPKLDERGVLHWPVLLLYPEVMSSDFIEDFPETDTFVPHLDVMFSESSPPLPWDDKHAYTRDAVELYYQAGVGTVLSKSEILKILLEGTMDSKSLPESLLDEEDGENDDGKSSTITSSDKGSVKWINVKEGKTLQEVLQHKDFIIPAIPVFFVVSRKSTFYRKFKAGNWSLP

SEQ ID NO: 56569 - protein, 132 aa, Oryza sativa; identical to SEQ ID NO: 31983

SEQ ID NO: 56570 - protein, 334 aa, Oryza sativa
MEERYEALKELGAGNFGVARLVRDKRSKELVAVKYIERGKKIDENVQREIINHRSLRHPNIIRFKEVCLTPTHLAIVMEYAAGGELFEQICTAGRFSEDEARYFFQQLISGVSYCHSLEICHRDLKLENTLLDGSPTPRVKICDFGYSKSALLHSKPKSTVGTPAYIAPEVLSREEYDGKVADVWSCGVTLYVMLVGSYPFEDPGDPRNFRKTISRILGVQYSIPDYVRVSSDCRRLLSQIFVADPSKRITIPEIKKHTWFLKNLPKEISEREKADYKDTDAAPPTQAVEEIMRIIQEAKVPGDMAAADPALLAELAELKSDDEEEAADEYDTY

SEQ ID NO: 56571 - protein, 494 aa, Oryza sativa
MKKHDVKDSELSLPDKDCGAAFVFFKTRYAALVVSEIVQTSNPMEWVTSLAPDRDDVYWSNLWLPYKQLWIRRIVTLSGSIVFMFLFLIPVTFIQGLTQLEQLQQRLPFLNGILKKKYITQLVTGYLPSVILQIFLYTVPPTMMFFSTLEGPVSHSERKRSACCKVLYFTIWNVFFVNVLSGSAISQVNALSSPKDIPMVLARAVPVQATFFTTYVLTSGWASLSSELMQLFGLTWNFIMKYVLRMKEDSYFVPSFPYHTEVPKVLLFGLLGFTCSVLAPLILPFLLVYFFLGYVVYRNQFLNVYCTKYDTGGLYWPIAHYTTIFSIVLTQIICLGVFGLKESPVAAGFTVPLIILTLLFNQYCSNRLRPLFKTLPAQDLIDMDREDEQSGRMDDIHHRLHSAYCQFADTDDIPLKGVHVDRDADASGSSGESSCKEDTNQPTTSDISHPTLEGLPVNRLRHAVRSLSSIIRLQKRGLSPQPAGPSADVNPQTA

SEQ ID NO: 56572 - protein, 160 aa, Oryza sativa
MAAVVRGVLNGIREKGLSNFLRHARDEGYFKCLLDGNLLQTKIHNIGATLVGVDKFGNKYYEKLHDTQYGRHRWVEYAEKGRYNASQVPPEWHGWLHHITDSTGDELLEQNAKAYIVDHKENFSGEGEELIYHSKGHALNPGQRDWTRYQPWEPKKEEAT

SEQ ID NO: 56573 - protein, 362 aa, Oryza sativa
MGGSKAEEKPAGGGGGGEDWWCYQFGNKDALIVKSSKKSPLALRMVVFAMTMICGIFICTMCMKQLGSDSLSRIVKIEVAEQLCNKSAILHSEVHFVHYPQPITYSRSECKCTPVRFFAIISSQRSGSGWFETLLNSHMNVSSNGEIFSSKERRSNISSITKTLDKVYNLDWNSSASKNECTAAVGLKWMLNQGLVANHADIADYFNRRGVSAIFLFRWNLLRQLVSQLANNHDRYLKQLNGTHKAHVHTAYEASILARYKPRLNTTSLIRSLKQVDDYTRDALENLKSINHITIYYEDLIRNRTKLLDVLDFLKVPRSKLVSRHVKIHTKPLSEQIENWDEVYNALNGTQYESFLNADYRI

SEQ ID NO: 56574 - protein, 291 aa, Oryza sativa [sequence omitted]

SEQ ID NO: 56575 - protein, 884 aa, Oryza sativa
MAALDPPSELLVTPKTARKDEAASCNAATPPKPSPVSPEEMRAVARKFAEQPVQNPDDGVWAVLTAISKNARLRPEGMNILLSADEHYIGRAVQESSFKISSLQISGKHCKIYRDTVLGELNRNEPVPVFLKDSSSNGTFINWTRLKKISPPTKLNHGDIISFVSAPHDNTSFAFVYREVNAVSRAENEVTILKRKSEDIHSERKRLKGLGIGSSDGPVSLDDVRRLEKSNAELREQLEEHVVTIETLRTQIKISEAQHEKELKELKEITSSTYVDQAKSLQQTLEYKQKQIDSLSTSNTELQNSIKDLDERLSAYKQSRAEADEVIQSQKSNICELEAQLSEERDLRREERDKAAEDLKSALHKVNAEAQEEIKRQAEAHLRQQREQKEVISKLQESEKEIRLLVETLRSKLEDTRENLVTSEKKARELEAQLQDEQLVSANNQKKSDKLEMDLRKVKKELEHEKAAREEAWAKVSALELEIAATIRDLSIEKQRYQGARERIILRETQLRAFYSTTEEISSLFAKQQEQLKAMQRTLEDEENYENSIMGDDLNKVPLATVTADDARTRVNYSKNTMEASGASTENTQASEQSSSDDSKETEQQDDFTRVEGANTQEVECNSPEMATERFRSDSHGDLAATAPELEPTDTEQVPETESRAGNVGCGDHNSALQRFSEMGGDTMQLDDEVQPQENDESILICKDRGQPQGNEEASLTLKDGIGHYSEEKLEVNCSERKHEDTQTRTIGTADLLASEVAGSWAVETGPSVNGENESPRSLGETTDHAGEQDENVRGSSAADALVNSDGQAAGSQSNIDHVISKITDHHRVLNAMIEIVDPDFRKQLPGSGVGKDDLMSDAETEEGSEANDTDSDSEEAMVEDSVG

SEQ ID NO: 56576 - protein, 606 aa, Oryza sativa
MERFKPLNVSIVKKGLSAKTSGGTSHLIRHLKICPAQHGTSRVQKKCSSLADLPIVKSWKDDQESSLDEIIRSIVSNLCPFSAMYSASFAQFLAGRNPVLNMVQQATVEEKFLSVFHNEKMKLKEKITATPGGVFLSLGEWQRLFYIQVRVACLTVHFIDEDWKINRKTIRCSLSVFGKSDILSLYPHWQSDIVLAEKVLKEVVQDWGLLDKLLGVTLQRSVDKKAPLHLEDDITGRNYLLSKCRLLSIPCMVDALHELMDSTVLDMESTWSHYMTSSPERKQKYQEILSQLHLDRPSLGSKGWYFTFYFSEAALQFIKSFPLPDAKPNCQSGPWEPSFDDLEATENYCKIARSAYRVIKVVSGPHNMTFNSYFHVIWSLRAAIQELPSIKNIGRVFDVAYMQKKFDRNWKKWYLWLSIAVVLDPRYKLGFTELCFRQAFSHVAGMYFSEVRAKLHELYIQYSYVNEQSKEILDHKNNCSDIQISAPLHNKGQNSTTAQAAVEEFKELYEYLGGGLCTQDDSFDILKWWRGNSSAYPTLAMMARDILAIPGCAVSTESAFDQCDQRAELFDGKLRPETTEALICAQSWIKSSGTADADDGNKNTSF

SEQ ID NO: 56577 - protein, 331 aa, Oryza sativa
MGNSIYRFLCGLCSPSPEYQPHGAHPAVAALGRDIQQFEATSQVPDGLSRHVVSSKKAQANWYKKLIVTWKKARPTPRTPEEAARLVVTTLKNHQKADVEGFLVFYGLPIPNAAASTPAPHTAHVPKPQGCEFELHTLPVDAKAVADGDTITVYIDTADPRESGNVPREIQKAAAERTRARAARDYQKADGLQKMIADAGYRQVPNARGEGVLAKKYRIRLRGIDAPESAMPYGKEAKEALLKMVQGKSLKVYVYDEDRYGRCVGDIYCDGVFVQEQMLKKGCAWHYTAYDQRPELAKWEKQAQSGRKGLWAASRPQKPWEWRRDKRNGTA

SEQ ID NO: 56578 - protein, 155 aa, Oryza sativa
MGRTETLAWLELFGVNSIFTMFSLSSSLPNTLEPSISELVFGLSLISSLSMVLLISGPISCLSFTSLSIFSSIFLICCTILWLEKQLFNQRQQKLLLTLLRWRLRDEPSSSDWRVSAAYSSSKSSISYATSLSLASQLRAALSLSCRASASSTCA

SEQ ID NO: 56579 - protein, 236 aa, Oryza sativa; identical to SEQ ID NO: 30241

SEQ ID NO: 56580 - protein, 411 aa, Oryza sativa
MLALIKRCRRYRRKMKKKMLARIAHEATEQHREMEARDAADSVMIEIGPVEKFLNEILSEKPMRFTSEQLAACTGNYSSELGSGGFGVVYRGELPKGLQVAVKVLKVSMNKKVQEAFMAEIGTIGRTYHVHLVRLYGFCFDADTKALVYEFLENGSLEKYLYGGGGEDRGKKLEWRTLHDIAVGTAKGIRYLHEECQQRIVHYDIKPANIPLTADFTPKVADFGLARLGERENTHMSLTGGRGTPGYAAPELWMALPATEKCDVYSFGMVLFEVLGRRRNYDLAAQAESQEWFPKWVWDRYEQGDMECVVSAAGIGEEDRAKAEMMCKVALWCVQFQPSARPKMSSVVRMLEGEMAIVPPVNPFHYVMSGGSGSSTLTSSSTNLSSGGTTTGSSEVAVSLPAKKSTDVMVE

SEQ ID NO: 56581 - protein, 572 aa, Oryza sativa
MSLSSARQRRATAASPPTDDGYSKEAKDRRRRPSGEEEEEGIRWFLPFLALGLLRHMSASSNLIHDCDEVFNYWEPLHFLLYRSGFQTWEYSSNFALRSYLYLFIHALVAGPASMIFGEHKVRVFYSVRIFLGLISTITETVLVVALSRKYGKRLACYVLAMLCLTSGCFFASTSFLPSSFSMYAVTLSSALFLLENYAAAVSVAAAGVILGWPFSILVFLPITVYSLIRGSFRRVFLSGFLTSMFLLVLSVIADYYCYGKWTASVFNLLKYNVFGGGESHLYGTEGPSFYFKNGFNNFNFAFILALLFLGFVPFARKKYVPDLLIVVSPVYIWLAFMSLQAHKEERFLYPIYPLICVAAAAVIDTFPDFFHDKYSSEQSIFEKIAKGLRPLILGFILCASHSRTFSMLNGYGAPIQIYQHLEHHEDTGPGSVLCVGSEWHRYPSSFFIPSYISEVWWIDDGFRGLLPFPFNETLGGTTAAPSYFNDKNKASDEQYLKDIGACSLLVELDLRRPYPSRGSDLSTWETLAALPFLDRELSPALYRSFFIPHRWQQNNVFGLYKLLRRLPTDQA

SEQ ID NO: 56582 - protein, 308 aa, Oryza sativa
MAAVAGGSRAAPPADSAAVAAVAKEAEYQKGVQKLVDLLSKLNPAAKEFVPSSAAVSSPSRKALSADAPVFDYNSIGGWNGGGKESGADAYQQRRRRNGYLSQGRRRMNERARHADREDSIRRTVYVSDIDHTVTEERLADIFANCGQVVDCRICGDPHSVLRFAFIEFADEEGARTALNLGGTMLGFYPVRVLPSKTAILPVNPKFLPRTEDEKEMVIRTVYCTNIDKKVTQLDVKNFFEELCGEVSRLRLLGDNVHSTRIAFVEFVHAECAIMALNCSGMILGTLPVRVSPSKTPVKPRLNRVASN

SEQ ID NO: 56583 - protein, 166 aa, Oryza sativa
MIQAVMVMSTQGKPRLLKFYSYQPPEKHQDLVRGVFQLLSARPDSVSNFVKVDAIFGPGAKLVYKHLATLYFVFVFDSSENELAVLDLVQVFVETLDRCFKNVCELDIVFNFNKLHTILDEMILGGQVIETSSEQIMRSVEEIARLEKQSNTTSLIPKSISERFSR

SEQ ID NO: 56584 - protein, 583 aa, Oryza sativa
MAVEESPPPPPSSPPPPPSSPQPAAEVGAGGRRADKSGRRLEVYSEVLARLRGLGAAAPVEISPAYEDALWAHFHRLPARYALDVHADRAEDVVTHHRLLEEARDPDRRPALSVRVVQVSRILDGDMDDCSELGMEPVHTNHLARQMVHPPPAFGSCSNLEALALEASEANLRSSNNDEDSSVHLISRPMHEITFATTDKPKVLSQLTCLLSELGLDIQEAHAFSTSDGYSLDVFVVTGWHLGGTEQLKEKLLEKFHDIETQAWPTSNSSSQSLEGPSGGESMPSTSVEIPTDGTDVWEIDLKLLKFGTKVASGSNGDLFRGSYCSQDVAIKVVRPERISADMYRDFAQEVYIMRKVRHRNVVQFIGACTRQPNLYIVTDFMSGGSLHDYLHKKNNSFKLSEILRVATDISKGMNYLHQNNIIHRDLKTANLLMDENKVVKVADFGVARVKDQSGVMTAETGTYRWMAPEVIEHKPYDHKADVFSFGIVLWELLTGKIPYEYLTPLQAAIGVVQKGLRPTIPKDTHPKLSELLQKCWHRDPAERPDFSQILEILQRLPKEVRADTEGRQKSKAGFLSALKRNH

SEQ ID NO: 56585 - protein, 184 aa, Oryza sativa
MAFLSRRWQQLWRCCCPKLVLKRGTMFQPKNTSMKRTRTKFARRVNSLLRHLCSPPTLRKFVVKFGLRRKHTCHVDVDVDGWVRFCAASRARHIAFDFTPGAKNIFKGLPDDKYIFPLHVFSGPDSSPSHVRSLNLAYVCLNTTTTGFAGFANLKKLTLHKVLFLSDSQCLMQSCCRNALLLSG

SEQ ID NO: 56586 - protein, 442 aa, Oryza sativa
MASPAKAQRRPEGASVLETLPALPLAIIIAKAGPRCAAALACASSTLRAAASGEALWRHFCSDDFALDAPLAPGDLPLPSFKDAYKAWFQSFGMYPLPLVKRVKIFWSSFRAWLCEYFPEGLRTLGEGVSEAEIAVAECNLGLVLPMPTKLLYRFCNGQLHIGRGEEVSYGVMGGYDYVHQRYTVRLLPLAHHAVQKNSNYIVVATSCFGEKIFLLDCASGRLYVGTKYWNEEREIMACVPKATIRLAVDDDHGMPQDGFLLWLEEHLSRLQDGLIKVQSCKFPMLARHISLYPVQLPYCSSASMHGIKVRASAVFAPENSAFADYRCRYSYYFSIRLSLPEAFVVDGKWYSSFQLQSCHYTIQIGDEVLPYTCNYGGHGKCPLLRCGEELFVYGCSISAALEPGSVMGNLTLVPWRCGQPRGSPFIADIAPFPLHPPDYIF

SEQ ID NO: 56587 - protein, 282 aa, Oryza sativa
MALNPLFTVTFNVSGSGSDNYGDFIAGIRKRVANPRHFSHNRPVLPPVEPDVPPRRWFHVVLRTQTSELTLATRADNLYLEGFRGSDGTSAWWELTRGLIAGATYLGFGGSYRELLGHTDNMVGVTLGPQQMTQAVDTLAGLAASGGGAARQRAGEALATLLLMVNEAVRFLTVAELVGGFMNPRAVRKSGTITADMKEQVNGWKVLSRALLTMDALQLEDSNSASKHNKVDTKKMEQEKKAWEAAEKLAVEAAKAVGILLFVEKVPAGMTKATALQLFHGN

SEQ ID NO: 56588 - protein, 488 aa, Oryza sativa
MAPATQMAAPPPRARGGSFRVLRTARVAPSSPDGVPMLVERAVPLTFLDAIWLPTPPVDRVFFYRLGADDDGVDAVLSRLADSLSRALHVVYPLAGRLRLTPGKTNRYELFYQPGDAVAFTFAEHDDGVGVDELAADDPREVAKIAPLVPELPDGGAVLAVQATVLPPARRGLALGVTVHHAACDGSSSTHFLHTWAAACAGAAVLPKPPVIDRTFIREREDLYDYMVSRTEESDKFRSPDVADSKLLATFTLSGEILQSIKDRVAGVAARRGKSPPPRCTSVVATFAIVWQCHIRAALGDVEADNKHHGRAHFIFPTDHRARMEPRVPDKYLGNCVGPCFASAPKEEIAAADAEDGLYTTCAAIAAAVDEGTRYDPDYWKRCMEHVGGMSASDGPPLAVAGSPRFRVYDVDFGFGRPAKVDVVSVAKTGAISVAEGRRGGIEVGVGLPPERMERFRRCFADAVAWLSSPSRPVTRDMDRSAPGHSPA

SEQ ID NO: 56589 - protein, 205 aa, Oryza sativa
MASTSGSAAAVEERGNSERKRKRGATGESEGSEAQPSKWRTRRAHEIYSSKLLDAIRLVRSGSPSSSAAAPPRSRAVREAADRALAVSARGRTRWSRAILASHRRRIQAARRARLREAISPPSRHPSSSSGKGPKAPALARKAKVLGRLVPGCRKLPFPALLAEASDYIAALEMQVRAMTALAEVLSTVSGSGSASSSGGSSSPA

SEQ ID NO: 56590 - protein, 224 aa, Oryza sativa
MGRRPARCYRQIKNKPYPKSRYCRGVPDPKIRIYDVGMKKKGVDEFPYCVHLVSWEKENVSSEALEAARIACNKYMTKNAGKDAFHLRVRVHPFHVLRINKMLSCAGADRLQTGMRGAFGKPQGTCARVDIGQVLLSVRCKESNAKHAEEALRRAKFKFPGRQKITHSRKWGFTKFTREEYVKLKAEGRIMSDGVNAQLLGSHGRLAKRAPGKAFLAETIQASA

SEQ ID NO: 56591 - protein, 260 aa, Oryza sativa
MAAESSLVPQTSSESIAQKMGFFRVPDLLVKLSSKCLIELDAVRSPTSPLDLIFFPGLGAKSPRSSFLGDRVGLGLVDSLTDDSSTPLGSRKVLLGSEMRITDNVTSKNSFTAPVEAGVVDQKDESMCDDLKGSFMSLDDIVNSEDYTRVVCRGPNPRTTHFFGDHVLEFEGEQLMPDESKSEESLPPRLEEGMMSFCYFCGEKLEEGKDIYVYQGDKAFCSMECRENFMEDEMEEGEPDLSAPPSSPVANDGCIFQLIQ

SEQ ID NO: 56592 - protein, 316 aa, Oryza sativa; identical to SEQ ID NO: 50093

SEQ ID NO: 56593 - protein, 347 aa, Oryza sativa
MANPAAAAGPSGGARSFLQAVSTVTEEAPSPLRVVQMEGLAVLKIIKHCEEFAPALVTGQLLGLDVGSVLEVTNCFPFPMREDDEEADADGANYQLEMMRCLREVNVDNNTVGWYQSCLLGSFQTVELIETFMNYQENIRRCVCIVYDPSRSNQGVLALKALKLTDSFMDLYRNNGLTGEKLREKKLSWVDIFEEIPIKVSNSALVSAFMTELEPESPVSQCDFDRLKLSTAPFMERNLEFLIGCMDDLSSEQNKFQYYYRNVSRQQSQQQAWLQKRRQENMARKAAGEEPLPEEDPSNPIFKPIPEPSRLEGYLVTNQISSYCNHINGVAGQNFNRLYLMKALQED

SEQ ID NO: 56594 - protein, 558 aa, Oryza sativa
MTTPRRRADPSPPPARRLLHRLGSAASGLQTLAYSSKKEGGGGDMGPRNGGSSSNRRPGFVDSSSWRYFDSRVVGITRGDIPRHAWTVLHMLKRKGFAAYLVGGCVRDLLLKRAPKDFDVITTASLQQIKKMVFQRCIIIGKRFPICQLNMYGTKIEVSSFSTNANHVKGSKNIGCSEEFKRYDEGDILLWQNSMKRDFTINSLFFNPFNFKIYDYVNGVRDISKNKVSTVIPARVSFKEDPARILRGLRIAARLGFEFSSETSAAIRELSLSITDIDKARLMMELNYLLSYGAAASSLRLLRKYGLLDFLLPFQAAYMSDQMKDKSNDTDLMLMKLLANLDKLLSADQPCPSCLWLALLTFHSALVNSPHDAQVIRAFAALMYFGSWEGAVNFLNQDIGAPAPFIPETLGPSRSKLENLMEQTSHLASLVKSSVDTLTSIDALQQSLAKYSKASQVSGLVLVSSRERERVLRIFEGLDTDLTSYEGTRGMQEIDYKLLKDGHPGEVRFVLGQVIMDTMSEELPRVSTEYDQLNMEASEDDLADGSRPSLSTLFSSKS

SEQ ID NO: 56595 - protein, 255 aa, Oryza sativa
MAGSTKLRPFLLTLLLLLSTTVASILAEYDPECDCDKPKHPKPSHPSPSPGHPKGPKNPTPRPPKGPTYPSPVTRPPPLVAPPKVPVTHPPKGPVTRPPPVTYPTPPVTTPPVVVGPPVTYPTPPVTTPPVVVGPPVTYPTPPVTYPTPPVTYPTPPTTTPCPPPPPATQRCPVDSLKIGACVDLLGGLVHVGIGDPVVNKCCPLLEGLVELEAAVCLCTTIRLKLLNINIYLPLALQLLLTCGKNPPPGYTCSI

SEQ ID NO: 56596 - protein, 227 aa, Oryza sativa
MECFKTTLAGVVLVVLLLQQAPVLRANDPDPLQDFCVADLDSEVTLNGYPCKPTPAAGDEFLFSSRLATGGDVNANPNGSNVTQLDVAGWPGVNTLGVSMNRIDFAPGGTNPPHVHPRATEVGIVLRGELLVGIIGSLDTGNRYYSRVVRGGETFVIPRGLMHFQFNVGKTEATMVVSFNSQNPGIVFVPLTLFGSNPPIPTPVLVKALRVDAGVVELLKSKFTGGY

SEQ ID NO: 56597 - protein, 165 aa, Oryza sativa
MMGSNSAGGGGGGAMVPGGMGGGGPMGAAAAGGGGGGDGRHDDEAVLTEFLSSLMDYTPTIPDELVEHYLGRSGFYCPDLRLTRLVAVATQKFISDIASDSLQHCKARVAAPIKDNKSKQPKDRRLVLTMDDLSKALQEHGVNLKHPEYFADSPSAGMAPAAREE

SEQ ID NO: 56598 - protein, 339 aa, Oryza sativa
MAPLVPSSQPWVEKYRPRQVKDVAHQEEVVRVLTTTLQTADLPHMLFYGPPGTGKTTTALAIAYQLYGPELYKSRVLELNASDDRGINVVRTKIKDFAAVAVGSARKGGYPCPPYKIIILDEADSMTEDAQNALRRTMETYSKVTRFFFICNYISRIIEPLASRCAKFRFKPLSEEVMSNRILHICNEEGLSLDAQALATLSTISNGDLRRAITYLQSAARLFGSSISSTDLISVSGAIPEDVVKSLLASCKSGEFDVANKEVNNIIADGYPVSQLISQFLDVIVNADDIPDEQKARICKKLGEADKCLVDGADEYLQLLDVASETIRALFDMPQTLVF

SEQ ID NO: 56599 - protein, 581 aa, Oryza sativa
MAVGMAPPPPTAAALPSRRRLRERIQSERQVVGGLLKKAEALVARAKEDVHGGRAAAAHSEACALPRRGRFLRRPEARPEAEATAAMDGAASPRKKRRKAATSASSIVEVEVIEPTMPKAQRDRLYGLLSSLSAEMPLPPHIVALMQSQCCCVVDPNGEEMDVDLGSAKDAALFQLLNLLEEFAQQQTTKIQPRLAEEQEPPKIEAPDATSRSSSICQLMEDGEVADEGADMDMDICGGVSPLVVDKVQFSPLPKQEEDDELINTSGGGGFSLQSPPAKQQEEEFVRDASPVAVDKFPQTESPSSSTGSSSGSSSSSSSSGGSSGSSCSGCSSSGSDSNDDGDSASSRPDNSELPTEAAAKPLEQQQVTVCGGVSPLIDEFSPLPKQQEDDELIDVTGGVSPVSVNKFPDSPRSSSSGSSSSSSSGSSSSSSESDSDDDGDSASSKPDTADHPTEAEAPKLPPLEQHEVAEQDKKLIAERAASPNTEMQELIARAQERQKLRLELERKTARELERKMAREQLQEMERTARPVYDSIDPSVMKQLGISGDAQYIVSPVKSRHSLHRRGGGGLLQKLGFFLKE

SEQ ID NO: 56600 - protein, 49 aa, Oryza sativa
MTSLVVSGLWQTPCIGLTTSRESHLLTYQTAVLPLKKLRRMCHQRIVNI

SEQ ID NO: 56601 - protein, 508 aa, Oryza sativa
MNVEEGKAYNLVMHIRSLESVELTASLTCSNGSQNLASNSVRETNLSTWTKIELQLLAQGTCRTSRLELTTRKRGVIWLDQVSLMPSETYKGHGFRKELMYMLLDLKPRFLRFPGGCFVEGNWLKNAFRWKETIGPWEERPGHYGDVWHYWTDDGLGYYELLELAEDLGANPVWVLNIGMSHHDAVNGTMLAPFIKDATDSLEFAKGSDKSTWGSVRATMGHPEPFPLKYVALGNEDCAPFKLIYRENYPKFYNAIKEAYPDIQIISNCDGSSGPLDHPADLYDYHIYENASTVFFKKNEFDRTSRNGPKVFVSEYAVNGEDAGNGSLLASLAEAAFLIGLEKNSDVVQMACYAPLFVNDNDRVWNPDAIVFNSWQQYGTPSYWMQTYFRESSGAMIHPIMISSSYSDLLAASAITWQDAENTFLRVKIVNFGPNAVNLTISSSGLQAGVDTAKSTVTVLTSSNLLDENSFSEPNKVVPVASELPNAAEQMQVLHFPYSICSFDLALV

SEQ ID NO: 56602 - protein, 131 aa, Oryza sativa
MATILAVAAMATFQAPTTLPGPLAPTLPVRRNVVSFAGRRQGRALGRLAVVVAAGSPTPPELAQKVSESIKQAEETCAGDPEGGECAAAWDEVEELSAAASHARDRKKDSDPLEEYCKDNPETDECRTYED

SEQ ID NO: 56603 - protein, 591 aa, Oryza sativa
MSTPPPAAAAPPATDQGKTKSKKKSKKHQEDTSSSLAVAAASVDEAAEAKADGYLIKPQSVAPPLDTSAWPLLLKNYDRLNVRTGHYTPLPAGHSPLKRPIAEYLRYGVINLDKPSNPSSHEVVAWIKRLLRVEKTGHSGTLDPKVTGNLIVCVDRATRLVKSQQGAGKEYVCVARFHAAVPDTARVARALEALTGAVFQRPPLISAVKRQLRVRTIYESKLLEHDADRHLAVFWISCEAGTYVRTLCVHLGLLLGVGAHMQELRRVRSGILGETDNMVTMHDVMDARWAMDNFNDESYLRRIVMPLEVLLTSYKRLVVKVSAVNAICYGAKLMIPGLLRFENEIEVGEEVVLMTTKGEAIAIGIAEMTTAVMATCDHGAVAKIKRVVMDRDTYPRKWGLGPVALKKKKMVAEGLLDKHGKPNEKTPSEWLRNAVLPAGGDAMIAGIAAAPEPEKPKVKEEADVAEETKEKKKKKHKDWAGDNADEGRKRKVGDDDLSASVSAKKIKVEEEADAVEGEKSEKKKKKKKDKAESAYADGEVKAELSDGEKGGSEKKKKKKKSKEGEAGDDEAEKSEKKKEKKKKNRDAEVTQ

SEQ ID NO: 56604 - protein, 185 aa, Oryza sativa; identical to SEQ ID NO: 37585

SEQ ID NO: 56605 - protein, 430 aa, Oryza sativa
MPPPLQAQRLLLSHRRLPSPHLRCFTAVSSLPSAPAKTVAAAAAHAPSSILSIRESLLSGERTAAEITAEYLSRLRRTEPSVRSFIHVADAAAEREAEELDRRIATEGLDAVGPLAGVLVGVKDNLCTANMPSTGGSRILDGYQPAYDATAVRRLREAGAIVVGKTNLDEFGMGSTTEGSGFQVTTNPWDDSRVPGGSSGGSASAVSARQCVVSLGSDTGGSVRQPASFCGVVGLKPTYGRVSRFGLMAYASSLDVVGCFGSSVVDTATILSVIAGHDKMDSTSSSHDVSDYKSELVPLDLLESKPLNGMRIGIIQETLGEGVETGVISSIKDAASHLEQLGSVVEEVSLPSFSLGLPAYYILASSEASSNLSRYDGIRYGRQVSGDDLNELYGGSRANGLGHEVKMRILMGTYALSAGYYDAYYKRAQQ

SEQ ID NO: 56606 - protein, 95 aa, Oryza sativa
MKWMQFVNRFKICLEKLDSPVQSLNVQNWVPWHHLHCFLGQLNATKLQGLTFLFVCAMSQSNEGINFLFIVVQFWFCLIIWEKGTTAYDQVSYTL

SEQ ID NO: 56607 - protein, 425 aa, Oryza sativa
MPAGDNPHSISEKKAALRESPKEPKNVGNQQPRTSPFPKDKAAGTVGIKRPQPNGPLNPTNPGTNGHLVYVRRRLETDHSKVSSYASADSISSLSSKKTVVDRPQEQGLKHQNSSLQTPLAPAAAAATSPASPSGGSLPQNSLRKQSLGKVVVQPSIIVTANPPPRNVVSTTSVPQNSIAAKLACSSVAAASPPPRNLVSTTPVPRNSITANLASSSVAAASPPPRNLVSTTPVPHNSIAANLASSSVAAASPPPRNLVSTTPVPRNPIAANVASSSVAAASPPRNLASTTKVSQNSIAANLASSSVSATSTASRGAAPACYPVDPQRSSNQDWKERFIRLQAFLRNNEQSGQEEYIHMLRSLSSVGRSKLAIELENRAVKLLIEEGKELQKMKVLNVLNKLSPTDALPLPTQPASVRHLAFPPR

SEQ ID NO: 56608 - protein, 432 aa, Oryza sativa
MKISVKTLKGSTFQIEVDSAQKVADVKRIIETTQGQHIYPAEQQMLIHQGKVLKDDTTLDENKVLENSFLVIMLRQGKGSSSSAPATSKAPSNQAPPTQTVPAAPASQAPVAPATTVPVTVSAPTPTATASPAPAVAVSSEADNYGQATSNLVAGSNLEATIQSILEMGGGIWDRDIVLHALSAAFNNPERAVEYLYSGVPEQMDIPVPPPSIQPANPTQASQATQPAAPSILSSGPNASPLDLFPQALPNASTDAAGLGNLDALRNNAQFRTLLSLVQANPQILQPLLQELGKQNPQILQLIQENQAEFLHLINEPAEGDDEENLLDQFPEAMPQTIAVTPEGLRRPAPAPPGRDLLGQRQPHRGEKLLRRGEEDGGDTDHGLPPWRQPRGEDCSDLQHLRPPYVHRRWPGRQQLCRPGTEEGALDGVRRR

SEQ ID NO: 56609 - protein, 311 aa, Oryza sativa
MAKHFVLNTGAKIPSVGLGTWQSDPGVVGNAVYAAVKAGYRHIDCASAYNNEKEVGLALKKLFEEGVVKREDLFITSKLWCDHHAPEDVPEALDATLNDLQLEYLDLYLIHWPFRTKKGSSIGKPESYLPPDIPSTWAAMEKLYDSGKSRAIGVSNFSSKKLGDLLAAARVPPAVDQVECHPGWQQMKLHNFCQSTGIHLSAYSPLGSPGSTFMNGNVLKEPIIISIAEKLGKTPAQVALRWNIQMGHSVLPKSVSEERIKQNLDVYDWSIPEDLLAKFSEIKQVRLLRGNFIVNPQSVYKTHEELWDREI

SEQ ID NO: 56610 - protein, 395 aa, Oryza sativa
MSGTGCFPAGEMAAVARVCRDGAAAARLKTGSLLAILVASAVGICLPVALTGAFRGKAGYARGLLLVKCYAAGVILSTSLVHVLPDAHAALADCAVATRRPWRDFPFAGLFSLVGALLALLVDLSASSHLEAHGHHQHAEEGESPPPPPPTHQPYAPIPTTKKSPVFELSGEMSPKKRAHSDDTDRDDVALFGAKSAVRSDEVVVAPRVGCHGHHDVVEVGEEGGGGEEEEARRKQKMVSKVLEIGIVFHSVIIGVTMGMSQDVCAIRPLVVALSFHQVFEGMGLGGCIAQAGFGIATVGYMCVMFSVTTPLGILLGMAIFHMTGYDDSSPNALIIEGLLGSLSSGILVYMALVDLISLDFFHNKMMSSSNKLKKVSYVALVLGSASMSILALWA

SEQ ID NO: 56611 - protein, 160 aa, Oryza sativa
MANLGGGAMPAGSSGGDGEVEAGFAKLQGEDFEYYMQTYSIMLGRNSKKSTVDVDLSSLGGGMNISRHHARIFYDFQRRRFALDVIGKNGCLVEGVLHLPGNHPVKLDSQDLLQIGDKKFYFLLPTRSIFASAAAARHPPIIPQQMPSTILCADRPPSSV

SEQ ID NO: 56612 - protein, 478 aa, Oryza sativa
MVRPTQDAIDTFVGITGADEAVAARKLEEHHGDLNEAVNAYFNEGDRTSTRANENPIPTGYDDMELDEPFGPVPTFHMPLGNPFSLLDQGFLERAAAVYGGGPHITHPREVRRIDVEVKDNNTPAGSSGHGPVIEDVTGHEFSHGPEIRGTVLIDEDDDDDNLPSAQDTRLPSNPSTSNYSVPRAPPIANVSDYNNDIEEEMVRAAIEASKRDADGLTNGLRSGERENASRGRDDDEIARAVSMSLETAEQERVLRQVGAHVSDHSDLSDKEDIEGATGTVERQVPTSGKVGTSDQLVDEENFQDDDVEEHSFVRQHSRRVPSGNDESTEALERANSHPSSLLPHNIENNQQFNGVFPSEWGGISSEEHDEAVMLEAAMFGGIPGRAAYPFSLPYHQNSSRYPTVAHPPSPTLTAQRLLREQQDDEYLASLEADREKELKAEQEAELRRLEAAAEREAAIAKQKQEEEEKRRKQTRAF

SEQ ID NO: 56613 - protein, 295 aa, Oryza sativa
MGIINWMQNRLSTAKQDKRRTEAAAVASSARRRGGGGGESCRQEEARDEIKIAGDHLLSIGTLGNESPPRPPAAAAATAAEEVADFTIEEVKKLQEALNKLLRRAKSTKSGSRRGSTAAEHDADERSSSSSSSGSQLLLPLDRFLNCPSSLEVDRRVAAADGEFSPDTQIILSKARDLLVNTNGGGAIKQKSFRFLLKKMFVCRGGFSPSPAPPPTLKDPVESRIEKLFRTMLHKRMNARPSNAAASSSRKYYLEDKPREKMQREHLHDDEDDDENAEDIFKWDKTDSDFIVLEM

SEQ ID NO: 56614 - protein, 209 aa, Oryza sativa
MELSIAPAAMAMAMGLLAKNPKMINHRYASDMQLQHRLSPACSVMFNKQCSYRITRKACSVLGAVSPIQCTETSTESLVSFKDFLVSVQTEEDGLIKLRVTVADTMTESIFEKVFSKNVAAAQPLPGFRRMKGGKTRDIPKEIALHLIGPSKVKKETIKNIISLTIAEYVQKEDLDASRNLKVLQTYEELEAAFEPGKEFCFDATFHLQ

SEQ ID NO: 56615 - protein, 365 aa, Oryza sativa
MGNIVNTVNKFSGNNADGVPFRRCSYLPNSTCDENGSSVTRKSASATNGSINGHGTLYKDVGNEEMHLATDSTSKPGCRGDTNHCTNKERETRNVIVHTDSRQNGDATNSDNAVLICNQTAGHMSYGLDGESNRSSGSLAAVVSEVLVSKAPLEKRCRTNLQETGDLENTPNAHVSKRSRLHRVSPANSLFDREACDDLIDSAHNLDCSRTPNASVHDETVPNEDKTPCTSLDVRGCEGTPRASLKRRVNKKRTKREASYPTTPLNGNTGALVVIEPPLTRTKAKGKALSLATPESLKRSTRSGRLIVPRLDPGSQKIIYDMDGSILAITNLESPRLQGPYSEPPPKRRKTPRCSSPGHRRLLPF

SEQ ID NO: 56616 - protein, 172 aa, Oryza sativa
MEEDSVISNGGREEEVVVANGSGGGVGGTARSSGGGGGKVVQVLQRNFGEVQGILEQNRVLIQEISQNHEAATPMASPATSPSSGSSTPTSPVSSISTLISPAPSPALSLPLPAPITPMPPTAPPLLLPPQPRQASGPAPPTPSRAPTTPAIRFLLLLAPILFSLFSFCLEF

SEQ ID NO: 56617 - protein, 647 aa, Oryza sativa; identical to SEQ ID NO: 46749

SEQ ID NO: 56618 - protein, 538 aa, Oryza sativa
MESLALLHAKPGGLPPRAGLRLPLPRARSARVSLPSSPAAPVSLQSPLLLASRSGPTSRDAVVGLGLGCGLLRRRSGASGGGGGGVSCGAQPAAAAAAGAVPAAQPEGKKFLGVEVKTLKKIVPLGLMFFCILFNYTILRDTKDVLVVTAKGSSAEIIPFLKTWVNLPMAIGFMLLYTKLSNVLSREALFYTVIFPFIAFFGAFAFVLYPLRNVIHPTALADKLLAALGPSFLGPVAILRIWSFCLFYVMAELWGSVVISVLFWGFANQITTVEEAKEFYPLFGLGANIALIFSGRTVKYFSNLRKTLGPGIDGWEVSLKGMMSLVVLLGLVITSIYWGVNKFVLNDPSLPKSDRKKKKDKPKLGMKESLKVLLSSRYVRDLATLVVAYGISINLVEVTWKSKLKAQFPSPNEYSSFMGDFSTATGIATFTMMLLGRIILRKFGWGVAAMITPTVLLLTGVGFFSLILFGQPLTPMLATMGMTPLLAAVYVGALQNIFSKSAKYSLFDISPRRRRRRSLLKAAPILSFELASSLFNHG

SEQ ID NO: 56619 - protein, 319 aa, Oryza sativa
MAPVRLGAPTSGALLLLVLLLICGGGGGGGVAAGGGGGGGGGKGSSVYPAPVVYPHHSRQISWKPRVFLYQHFLSDDEANHLVSLARTELKRSAVADNLSGKSELSDARTSSGTFIRKSQDPIVAGIEEKIAAWTFLPKENGEDIQVLRYKHGEKYERHYDYFSDNVNTLRGGHRIATVLMYLTDVAEGGETVFPLAEEFTESGTNNEDSTLSECAKKGVAVKPRKGDALLFFNLSPDASKDSLSLHAGCPVIKGEKWSATKWIRVASFDKVYHTQGNCTDDNESCEKWAALGECIKNPEYMIGTAALPGYCRKSCNIC

SEQ ID NO: 56620 - protein, 437 aa, Oryza sativa
MSDSHETDRNIEIWKIKKLIKALESARGNGTSMISLIMPPRDQIARVAKMLGDEYGTASNIKSRVNRQSVLAAITSAQQRLKLYNKVPPNGLVLYTGTIVTEDGKEKKVTIDFEPFKPINVSLYLCDNKFHTEALNELLESDDKFGFIVMDGNGTLFGTLSGNTREVLHKFTVDLPKKHGRGGQSALRFARLRMEKRHNYVRKTAELATQFFINPATSQPNVSGLILAGSADFKTELSQSDMFDQRLQAKILNVVDVSYGGENGFNQAIELSAEILANVKFIQEKKLIGKYFEEISQDTGKYVFGVDDTLKALEMGAVETLIVWENLETNRYVLKNSASGETVIKHFNKEQEADQSNFRDPASNAELEVQEKMSLLEWFANEYKKFGCSLEFVTNKSQEGSQFCRGFGGIGGILRYQLDIRSFDELSDDEGLYEDSD

SEQ ID NO: 56621 - protein, 223 aa, Oryza sativa
MHGVAHFTTPFSYHCLDSMHSAINGLLPHEIRVREISAAKPEFHARTSTRSKIYHYKIYNGPVMDPFHNHYAYHSAYKLNSQAMREAAKHFVGTHDFTSFANAVHNDRVRSPIKKIMRFDVIEMGAILQLEIEGTGFLYRQVRNMVALLLQVGREALPPDIVAKIIAARDRKELAKVALSAPPHGLYLMSVNYDKEMLQPPEGAPHISFGRTHQISKCKLLFY

SEQ ID NO: 56622 - protein, 312 aa, Oryza sativa
MAAAWAAVVAVMLLLAQVSAAAPVMGPAFLWAPKNYGFSSDEAKEIVHYQTVSPKSLVKSVLEEGGWSNLVCSREDHAKSVDVAVLFLGSKLQSSDISKDKQADSTLVDTLKNSFASSEFSMAFPYIAMSDDDKLEKSLPSGFAENCNNGFGDNHITYTDTCSVSEDLNKHHNMDSIHGLVASQTKKNPSGQTDLIVFCDGGFKDNTKSEGELLSELVTLLKKSGAKYTILYASQPFGLLENPSNLPLGRYLAEKTNTTKPGRGKCDGECLVKSTLLEGSFVGIVLLIILISGLKCMMGIDTPSKFDAPPES

SEQ ID NO: 56623 - protein, 335 aa, Oryza sativa; identical to SEQ ID NO: 35285

SEQ ID NO: 56624 - protein, 572 aa, Oryza sativa
MSSPFSVPSLIMEEEGRFEAEVAEVEAWWGTDRFRLTKRPYTARDVALLRGTLRQSYASGDMAKKLWRTLRAHQANGTASRTFGALDPVQVAMMAKHLDTVYVSGWQCSSTHTSTNEPGPDLADYPYDTVPNKVEHLFFAQLYHDRKQREARMSMSRAERAHEPYVDYLKPIIADGDTGFGGATAAVELCKLFFERWAAGVHLEDQSSVTKKCRHMAGKVLVAVSEHVNRLVAARLQFDIMGVETVLVARTDAVAATLIQTNVDARDHQFILGATNPRLRNRSLAAVLSDAMSAGKNGRELQAIEDEWLATAQLKTFSDCVRDAIASLNATDADKQRKLQEWSAATSHDKCVPLEQARDIAAGLGVTSLFWDWDLPRTREGFYRFRGSVAAAVVRGRAFAPHADVLWMETSSPNIAECTAFAEGVRAASPGAMLAYNLSPSFNWDASGMTDADMSEFIPRVARLGYVWQFITLAGFHADALVTDTFARDFARRGMLAYVERIQREERSNGVETLQHQKWSGANFYDRVLKTVQGGISSTAAMGKGVTEEQFKGSWTGPGSESSSHVLAKSRM

SEQ ID NO: 56625 - protein, 633 aa, Oryza sativa; identical to SEQ ID NO: 42938

SEQ ID NO: 56626 - protein, 188 aa, Oryza sativa
MSAVNITNVAVLDNPTAFLNPFQFEISYECLIPLDDDLEWKLIYVGSAEDENYDQQLESVLVGPVNVGTYRFVLQADPPDPSKIREEDIIGVTVLLLTCSYMGQEFMRVGYYVNNDYDDEQLREEPPAKLLIDRVQRNILADKPRVTKFPINFHPEPSTSAGQQQQEPQTASPENHTGGEGSKPAADQ

SEQ ID NO: 56627 - protein, 532 aa, Oryza sativa
MGYCVTTAKGAAETLKLNMAIILLPVCRNTITWLRSTRAARALPFDDNINFHKTIAAAIVVGIILHAGNHLVCDFPRLIKSSDEKYAPLGQYFGEIKPTYFTLVKGVEGITGVIMVVCMIIAFTLATRWFRRSLVKLPRPFDKLTGFNAFWYSHHLFIIVYIALIVHGECLYLIHVWYRRTTWMYLSVPVCLYVGERILRFFRSGSYSVRLLKVAIYPGNVLTLQMSKPPTFRYKSGQYMFVQCPAVSPFEWHPFSITSAPGDDYLSIHVRQLGDWTRELKRVFAAACEPPAGGKSGLLRADETTKKILPKLLIDGPYGSPAQDYSKYDVLLLVGLGIGATPFISILKDLLNNIIKMEEEEDASTDLYPPMGRNKPHVDLGTLMTITSRPKKILKTTNAYFYWVTREQGSFDWFKGVMNEIADLDQRNIIEMHNYLTSVYEEGDARSALITMLQALNHAKNGVDIVSGTKVRTHFARPNWRKVLSKISSKHPYAKIGVFYCGAPVLAQELSKLCHEFNGKCTTKFEFHKEHF

SEQ ID NO: 56628 - protein, 185 aa, Oryza sativa
MAAEGSSRGGGGGRKASWLGMSSEGGAAKFLSGLPSRGNFSSISASSTLGRLRVYVCEHDTDPPEGQVIETDTTNILIRHLQLKKKEMDAKEAKEARDAGSRNQGETVKWKRVAPRSLDGQSSSKRPNLGSSSGLSSAEEAAPGFSGHTLQTFTVERLRALLRQRGLMTKGKKDELIARLRESQD

SEQ ID NO: 56629 - protein, 72 aa, Oryza sativa
MDAACMQSCRLKTGHHSSVYHEIAAQMLDSLVRITSFNFQPDFRATVPHQLKSTDQHICHWFSHLLDIVLNF

SEQ ID NO: 56630 - protein, 1097 aa, Oryza sativa
MMTMSDDGDRTCPLCAEDMDITDQQLKPCKCGYEICVWCWHHIIDMAEKEDTEGRCPACRTRYDKDRIVKMAATCDRTVVEKNVDKKQKTQKVKSKAAVTVEAKKHLASVRVIQRNLVYIIGLPANLCNESILERREYFGQYGKVLKVSVSRPTGAPSQQAPTNNSISVYITYAKEEEAIRCIQAVHNFVLEGKVLRACFGTTKYCHAWLRNMTCGNPDCLYLHDVGSQEDSFTKDEIISAYTRSRVPQMASNVSQRRAGTVLPPQAEDFSYSAVVAAKHPIKNGITNTANQSRLSPPNSSSGRSTLPPAASWGHRDLNTRTTATGVASSQSLTKSKADPQSNSFSSSSTVSSTKLPSSWNDDTSTVPKMTEGRDSLSKTLKPYKPGIAKETQAVTSLESSLDIDFSTIPSAWNDDDVTSDGMSKGSDEKQVVNDNGKFECSVSSKPAESGHLTSKSTTSPKKDIAVNSTRQSPLNCVSSPSVSKSEVKDGDGDYQVTNMASKTSTLVIRKDQSNQAAIDTATEDTRSESTDIDRLSVGVSSVTLSRKDGVQSIAENQQPDAILSTSVVVPFSQNLKLAECNDSTCQPSSDKHRDWCSDIQSSVSPQLNDIESYAVATDKSHGRVLDAADQASSSPYVHFPNTAPISLWNGKEINHTSTSDRTSTMMQPGLLSSVDSTSTMLNGHQEGLGTIYAPGKVSEHPRMKNHQPGAVGAVRIDNIGSFDKAVSVNKDESSIIADILSLEFDPWDESYSTANNFAKMLSASEKNDVLFDARSWKTKTSNSESRFSFARQDNQGSLLDSSMRNYKSEQNFSLPSQNSHGNIYQSGIAFQSPEEGFSKSNSLTMLDMLATGTSKPKVSAPPGFSAPARVPTGFSSGFSSHEGLNPPPGFSSHNGPNPPPGFSSQGGSNQIYGSAYSETRPFDDLLGINTSHYQPQLARQTSDIESVDPAILAVGKGRMPGISDSGLEMKTSHTFPSQLQTSNDPRFQLLMQQNMPSHQNVGFAEHVQDAFNPMNDNYLASRLIPQNHGSLSSYTQMSLQQPRSSHLTNGHWDGWGDLRQGNNVSMPDMSRMLYPTEANNFHMLGSNDLYNRAFGL

SEQ ID NO: 56631 - protein, 354 aa, Oryza sativa; identical to SEQ ID NO: 29999

SEQ ID NO: 56632 - protein, 44 aa, Oryza sativa
MVCLIESIANQLKEIVAGFARCVDLGIFFFLCFTVLFSLHDVYK

SEQ ID NO: 56633 - protein, 177 aa, Oryza sativa
MKLCWRILCLEDIRLSLTQLVSARDVVQTILKLENDRRMEVFFLLWVWWYARNKVNSGEDVIRVEEVVHKVKQLICDHASLRKGKHPKVNVQRNKWVPPVDGNLKLNFDGAFRAVNKSGGYDFLVRDLRGCAVLAGAGCLEHVHDAFAAEAEAGLAGLKSAISHGINSVQVETDSPS

SEQ ID NO: 56634 - protein, 501 aa, Oryza sativa
MEQAPTEAKKARSSESSPQAYADDVDRLSALDDASLHAILYCMPLRDAAVTTALSRRWRRVFPTLPCLYIDSATFNGRDYVADSLGDDYCEDPDRWVEALDCIVGSRAAPVAVFDVEADVMFTEEGWFHDVIRVLCRSGGLLKLRIWNTRLTSCYLLPSPVYACETLVSLELFSCRLRVPDRLTGLRALQSLVLQDVVATDGDLQRMLSRCEAMKRLVMEDIRKARNIVIDAPSLEYLQIHSYRPLRVSVKAPKLRLARLSLCYGCAELSWSFHDNEETDGDYSIAEIQEMFDFVAMEKKEHKRTDEIRNMVTFFCGIRAAKELRLDLPREYSKVLSKTKIAVPRMLPKKCCLLGLQKLTLALDHNHEALARLVSCLLNSSPNLKDLEIMDPFDIRYSGHLATEFWEKHITADCIQNHLSVVTFYMRESLFGGYPRIGLCQFLVMNARALKRMSIKYHRSLYKTEHVATVLEAVQSELRLWPRASPDVQLELSEIDCIPSI

SEQ ID NO: 56635 - protein, 326 aa, Oryza sativa
MKRKTRNKIILTTLLVSAAAILIGGTVALILTAGTWKVKMKESREKICDKGWECSGSKYCCNDTITDFFKVYQFENLFSKRNSPVAHAVGFWDYQSFITAAALFEPLGFCTTGGKQMQMMELCAFLGHVGSKTSCGFGVATGGPTAWGLCYNHEMSPKEDYCDKTNLQYPCVEGAEYYGRGAIPVFWNYNYGAAGDGIHEDLLHHPEYLEQNATMAFMAAMWRWMTPMKKKQPSAHDVFVGNWKPTKNDTLAKRLPGFGATMNVHYGDQICGKGYIDDMNVIISHYQYYLDLMGVGREHSGDNRDCAEQAAFNPSYKKPDDQQQQS

SEQ ID NO: 56636 - protein, 131 aa, Oryza sativa
MGSCVGKERSDEEDKIDFKGGNVHVISNKENWDHKIAEANKDGKIVIANFSAAWCGPCRVIAPVYAEMSQTYPQFMFLTIDVDELMDFSSSWDIRATPTFFFLKNGEQVDKLVGANKPELEKKVAALADSA

SEQ ID NO: 56637 - protein, 461 aa, Oryza sativa
MSSAAAVVRVVSRRTVKPAAPRPRESIPLTSWDLSMLSADYIQKGLVFPPPPPCLLVVDHLAAALSTTLNTYYPVAGRFVTHNHPEPEGGCSVSIDCDGQGVQIVHAVADAVTVADLLPPDAHVPPLLHSFFPLGDAVNYDGHHLPLFVVQVTHLVDGVFLSFVYNHALSDGTAFWDFLNAWVEIARASCLAAPTSPPPLFNRWSPSPGDGAPVVLPYADLSELIERLQPPLLCERMLHFSSESLVALKERARQELLAAGDTAGAAALTRFQALSSLLWRCITRARRLPAEQQTMCRAAINNRGRLQPALPREYFGNSIYAISTEKVQASELVERGHGWAAAAVGRAVAAHTDADIRARVAAWEVKPIIYTARYFDPSGVMMGSSPRFDMYGCDFGWGKALAARSGKANKMDGKASLYPGREGGGSIDAEVVLTPHHMAALDDDHELWAAVTPLLLNNNKP

SEQ ID NO: 56638 - protein, 538 aa, Oryza sativa
MPPLSLSAKARRGFSSSSSSASAAASSCRSQLEQDVKKLQKALQEETTLHAILENALHRAALTLADMSYLPTNAQELLSNISILEGTISKLEDDMVSLHFQLIQERNERRLVEYRLKQAPPPPQLQLQQPRSVCSCHSTKSESDDTANEKSCRVDKVYPFAVLHDSAMKLQRQLSSKCFGNPNQLSEDIVRCMKNIFISLSDSCRESSRTPSTEKQQSGPSPSGNYSISAFWSLSEPTSISSWVQSPQVDLNYNNNLLASETVFDPYKAREKLSWADIGSYGAAAEVSWMSVGKKQLEYAAESLRKFRLLIEQLAEVNPIHLGDDAKLAFWINLYNALMMHAYLAYGVPRSDIKLFSLMQKAAYTIGGHSFSAAFIEYVILKMKPPNHRPQMALLLALQKIKVPEEQKKFCIGSPEPLLTFALSCGLYSSPAVKIYTAGNVREELQDAQRDFIRASVGVSRKGKLLVPKMLHCFARGFVDDNSFPIWISHFLPQQQATFVEHCVSQRRQSLLGTRTFGIIPFDSRFRYLFLPDMGFSN

SEQ ID NO: 56639 - protein, 703 aa, Oryza sativa
MEDYPEELRTPPLSLVSIVGCPELHPAISAALSSRQPPMNLLALPDFSKASILARTAKARDPLAPPQAPAGILKKDWLLKHRTRVPAAVAAMFRADQVSGDPAQWLQACSDLENLKSVIQGRNTKLVVILVQSQAGDELSEDVTVALRKRAEIDSKHLVVLVERDEMEWTKSLNKLTTVFAELCTTYYKDEGRRVKARIEKRNFSSVELSIRYCFKVAVYAEFRRDWPEALKFYEEGIRVLREMIGTSTRLPPTQRLVEVKAVAEQFHFKISTILLHGGKVVGAITWFRKHIRSYERVVGSPEVAFLHWEWFSRQFLVFGELIETTSTTVPDTLSPRFGTADNALTEWEFQPAYYYQLAANYLREKRYALEFSSSSVSLTKGVNGLPESVMPSVYVGQYVRLFEQGDTVAVLPLSDTEYTSYALSEAERFQDSYEIIALFRKAYESFRSLGATRMASACSGGMAIEYYAAGDFSNAKQLFDGVAGLYRQEGWATLLWENLGYLRECARKLKSLKDFISYSLEMAALPLFSGSGQGNSENKRKNGPAGSPTISSRELIQQEVINILEGKHASENTDDEFDLHLMVESTHLDIDQISPLRIVFLASVAFHDQSVKPDSPMLVSVSLQSHLPCPVMIDKLEVQFNQSDCNFVIVSAQEDCSASNSHVHDGAVQTPLTLFTDKWMRLTHEVKPEWKAGMFGGEGNNK

SEQ ID NO: 56640 - protein, 343 aa, Oryza sativa
MMQTAGRRRHRWVKEWVPQDLVVAGGPCALYKWVREDRLSALKSRDKEQEAELAKPEPTTEVLFLCSYEGCGKTFVDAGALRKHAHVHGERQYVCHYAGCDKKFLDSSKLKRHFLIHTGEKNFVCPHEGCGKAFSLDFNLKAHMKTHSVDNYHVCKYPECARRFTQESKLRAHIKQQHEKGGLQNPGGSATNRSGLADHSHNSHTPKPSAAPPTPSADRPYVCPYDGCAKAYIHEYKLNLHLKKEHPNHYQDAGAQAASSKMSKRRSKPSLTAKMPLPKVPKRRGYTEPYQPPVSVVEEHQWPRNVLYEDDSEETEEEGDNVGDGARYRAASSDDDEETEDEE

SEQ ID NO: 56641 - protein, 544 aa, Oryza sativa
MSKFNPSPPSPKLVPFSNSPPSSANASAAESSQKVTPTPLVPSSLSLKDKALMDKKVVTRSRPLKLVYDHDIRLAQMPEKCSFRTLREVVASRFPSSKAVLIKYKDADGDLVTITCSAELRLAESCVDIAGSEVIEDGARHGQKLPMLRLHIVEVSPDQEPPMPTEEEKLEQDNELLVKGEDNSPHASAAVVTDAEVTKQDVENVVAEAEQNTLTGKKDCGHAECKEAEIDDWLLQFADLFRNQVGVDADAHLDLHELGMELCSEALEETVTSEEAQALFEMAAAKFQEVAALALFNWGNVHMCAARKRIPLDESAPKKVMSAQLCTAYDWVRDRYALAGSKYEEALKIKPDFYEGLLALGQQHFETAKLHWSFALADKVDLSAWDSSQTFKLFDSAEHKMRAATEMWEKVEEQRMAELKEPSSEALKKRKKQHNADGQGELTPEEAAEQAAIMRQQIHLFWGNMLFERSQVEFKLDIADWKKNLDASIERFKLAGASESDISAVLKNHFSNTVSECEDKKIMTLDTGISQISNNIEDKCILES

SEQ ID NO: 56642 - protein, 398 aa, Oryza sativa
MESMEPKDIDWSRVVSRYVRDETYEGIEAPHWADLTDPEAGVAAVDDEAWFCRPDCRHPKTVEDFLKMSPSPKGKLLRSVSAMMMPFGERDTNLRDGNNNLKRRGAVAGSGIAATFTPPKPKAAAKKRFQDDSENQDPALATPPPPPPAASRPPFGAARWAKNAKDAIKSSAEKRPGNAEKEALLSKNAAPRQLKSTLSARNLFSGKDILGQISDFYNELKRMAGGNGSRPGSEAMEELSSNPINEGDVAEKKVDCGCGTGDQVPSEEAIKEKSRQETAEKSPSTMKGKKMGLKVEAAKPTRSSVLKEVKATPPTPQRFPSPSTNRVKNVKAGGMSMASSPLKKPLKEKGTPSKDLENSKDAKRQPFGVKDMNNTKACDAEGSSSMFWFLKPCTFLVE

SEQ ID NO: 56643 - protein, 50 aa, Oryza sativa
MTNMVKMPSRKEWVEADPMLIHLTSFHHSLDLLLVVVAAAGAEGKGGERM

SEQ ID NO: 56644 - protein, 490 aa, Oryza sativa
MNAGFSPQILAQKLLKLNNSRQSIETLSHWCVFHYRHCRQVVETWESDFHSAPRERRVSLLYLANDIVQNSKKDSGRYVNEFWRVIPAALNDVFVNGDDFGRNVVQRLVDIWEERNIFGSHGQSLKEDYSRRFKEFKSKSRNSSGELLEKVISCYKHMLNAHVDDDTLMRKCQNALSFVDNLSNEYENNSILDCSNGSGFVEELQEQHNILRDSIEQFKTSELLRGNLISCLKEALHEQEFKMERARSQIKEVQSRYKKADDLCQKLGIHVERQEQPNHGPKNSGSEMHGSFGPDSANASSFEKGQSSAVMYSQENGGEHEIPNGVFSSRATKDNIEQKLEEHSTNKRQKLQNDVYVSRPQSPPPPLPSDAFEQPPPPPEHPPPPESTSPPPPPTSDPPPVPPPPPTTGSFMPIPSAPFAGLPVPAGPMTAVPYNSYPVFPPMNYPMVNIPPPFPSAPNTPPGFQGLAGPFYGPPYPAPPPPPPPPMNRK

SEQ ID NO: 56645 - protein, 223 aa, Oryza sativa
MEQLHSEFQQEEACMTQLLAVASLSLAAKMEETVVPHPLDLQVCDAKYVFETRTIKRMELAVLNALKWRMQAVTACSFIDYYLHKFNDDDTPSTSALSRSVDLILSTCKVAEFLVFRPSEIAASVALVALEEHETSMFERVATCYKNLKKERVLRCYEMIQDKIIMRNIMRQSAGSVFSIPKSPIGVLDAAACISQQSEDTFVGSPATNYESSASSKRRRICR

SEQ ID NO: 56646 - protein, 980 aa, Oryza sativa
MGVMSRRVLPACSSLCYFCPSLRARSRQPVKRYKKIIAEIYKLPPDGEPNDRRIGKLCDYVSRNPTRIPKITEYLEERCYKDLRHENFTLAKVVPCIYRKLLCSCKDHTPLLATSTLSIIRTLLDQRMNDDLRVLGCLMLVDFLNGQVDSTHMFNLEGLIPKLCRISQELREDDKGFRLRCAALQALASMVQYMGDHSHISMELDEVVSVIVSCYEVNQTLSIKEVVRLQDDDDLVINGSLTGLPVSGQNSAKVASDTMSASENPAHWARVCLRNMASIAKEATTVWRVLDPLFRLFDSHNYWSPENGIAFSILQEMQALMDKSGQNGHLLLSFTIKHIDHKSVAKKPAKQTSILKVASLLAKHAKLKASVTIASATSDLIKHLRKCMHCAVESPNAQNDVDKWNSALYVALEECLVQLTEKVGDVGPVLDMVGVMLENLSCTATIARTTISSVFRTVQIAASIHKSLYNQKAFPEALFHQLLLAMMHPDKKTRVGSHRVLSTIIAPSLLCPWSGISFPIPVKGNDSQSITLLALSAFSSEAVMDEVRIKSRTHEQLQNNVKPETVVGSENGYTHTEPNSRKSPGLGIPLKDENLKFMKLNSSQLVLLLSSIWSQAPLEDNSPANFEAMCHTYNIALLCSMTKSSSHAALVRCFQLAFSLRRMSLNQENGLQPSRRRCLYTMASAMLIFSAKVADIPQTIPLVKAAVPEKMVDPHLCLIDDCRLVISSPQSSNSGIVYGSEEDESDARNFLSCVNKNDTQLKEIVISHFKEKFENLSEKFNGIEEQLLQEFSLDDSFPLSAPLFMETPHSCSMYAEKDDHCFDEEVIPCEMDDDDDIVFEHSGSQSERKTSGSMASSDVLNVNQLIESVHETARQVANAPVSANLVPYDQMKSQCEALVMEKQQKMSVLLSFKHSRTDSRGSTAENGLETNESSARSEPETQSTRKERMRRSDSASSESDRSFRLPPASPYDKFMRAAGR

SEQ ID NO: 56647 - protein, 277 aa, Oryza sativa
MRVKRRSKNRKVVRFYATCFGFREPYRVLVDGTFVHHLLSHSLLPADDALQSLLSASRPPPLFTSKCVLAELRRLGKSHADAFDAAALLATAKCEHDKVVSAVDCVLSLIGEKNPEHFFVATQDSDLRAKLREVPGVPVIYGLKSSLFIEQPSVQQRKFAQLDEEKRLHMGKSEYQKLLKVPSDGKAAASENASDDEKNRRPISSLVENALGVADKSKFKKKRPKGPNPLSCKKKKPKPQLSAAQNQGPKADGEAKRKRVRKRKRSHKDSKQTETMS

SEQ ID NO: 56648 - protein, 1162 aa, Oryza sativa; identical to SEQ ID NO: 44303

SEQ ID NO: 56649 - protein, 58 aa, Oryza sativa
MSLHYLLDMHAKHFLFVFLSLFLIRFHLFLAVITALHAGELLPRRSAIIADMMLLLME

SEQ ID NO: 56650 - protein, 141 aa, Oryza sativa
MLLPNPQSPSQNPRHLRPKNPRRRPAPPSSRGASSEHYSLHVAEPASQHCRLLALLAGDPVSLRHRRASCAAPFPWSHCSAPPPVEPTSAVVFSWSQWSALPPNISSMAISSLPVTAACRLLHTSPIGTAILYHSVCTNTY

SEQ ID NO: 56651 - protein, 195 aa, Oryza sativa
MVVASGGGRNAWAKEMTIRRRITSIFNKTREHFPSLKDYNDYLEEVEDMTFNLIEGIDVEVIEAKIARYQQENAEQIYLSRAKRAEDLAAALKASRMNPGKAGANDTAAGSSQGISSGAGVQEGQYAPAAVPGGLAQPRPTGMAPQPIGGSSVPLQGDDEETMRLRAESGARAGGWSIEMCKRRALQEAFSTIFV

SEQ ID NO: 56652 - protein, 322 aa, Oryza sativa
MAMATIPEVPASALLPTMPRIGMGTAAFPFTSSEETTAALLRAIELGYRHFDTARLYATEGCVSEAVAEAVRRGLVASRADVFVTSKLWCSDLHAGRVVPAARETLRNLGMDYVDLLLVHWPATVAPGSYDFPFPKEEMAPAFDMEGVWRGMEECHRLGLARAIGVSNFSAKKLEQLLSFAVVRPAANQVEMNPMWQQRTLREVCRREGVQLCGYSPLGAKGTPWGSAAVMDSGVLHDIAQTKGKTLAQICLRWMYEQGDVLLVKTYNENRMKENLDIFDWELTEEERDKISKLPQQRGLTGMQFVCDNGPYKCVEDLWDGA

SEQ ID NO: 56653 - protein, 138 aa, Oryza sativa
MAAVDPHRAFRIQCSAVRRARAAVQIRSGPPMVTACVSCVNDGKLSPSSRQIGCRRRLASRQVIASIDRVLGWQIVLILCLLDQLGCKVAVLDVVMFVDMDFQNKLIDSLSREPQGFDTAGAKYSLQVICSIINYTTE

SEQ ID NO: 56654 - protein, 913 aa, Oryza sativa
MIERNTVNKASSKAGRTLPSVDGHIQFRDVRFAYPSRPDVVILDRFSLDFPAGKIVALIGGSGSGKSTVVSLIERFYEPLTGAVLLDGHDIKDLDVKWLRQQIGLVNQEPALFATSIRENILYGKGDASMDEINHAAKLSEAITFINHLPDRYETQVGERGIQLSGGQKQRIAISRAILKNPSILLLDEATSALDAESEKSVQEALDRVMVGRTTVVIAHRLSTIRNADTIAVVDSGRIVETGTHEQLMANPRSAYASLIQLQEAAQLQNKQSFSDSASLSRPLSSKYSRELSRTSMGGSFRSEEDSVSRYGTVEAHDEGGHKSKPVSMKKLYSMIRPDWFFGVSGTVSAFVAGSQMPLFALGVTQALVSYYMGWETTKREVRKIAVLFCCGAVLTVVFHAIEHLSFGIMGERLTLRVRERMFAAILRNEIGWFDDTSHTSSMLSSRLETDATLVRTIVVDRSTILLQNIGMIVTSLIIAFIINWRITLVVLATYPLMVSGHISEKMFMKGYGGNLGKSYLKANMLAAEAVSNFRTVAAFCAEEKVIKLYADELKEPAKQSFRRGQGAGLFYGVSQFFLFSSYALALWYGSELMSKEMASFKSVMKSFMVLIVTALAMGETLAMAPDIIKGNQMVSSVFEILDRKTDVLIDAGNDVKRVEGVIELRGVEFRYPARPEVVVFKGLDLLMKAGKSMALVGMSGSGKSTVLSLILRFYDPIAGKVLIDGKDIRKVKLKSLRKHIGLVQQEPALFATTIYDNILYGKDGATEAEVVDAAKLANAHSFISALPEGYRTRVGERGVQLSGGQRQRIAIARAIVKDPAILLLDEATSALDVESERVVQQALDRVMRNRTTVMVAHRLSTIKNADVISVLQDGKIIEQGAHHQLIENRNGAYHKLVSLQQQQQQQDQMQRH

SEQ ID NO: 56655 - protein, 913 aa, Oryza sativa; identical to SEQ ID NO: 42838

SEQ ID NO: 56656 - protein, 603 aa, Oryza sativa
MREGEDGAACDGEGEDAVKRPARIPHMFCKTLTASDTSTHGGFSVPRRAAEDCFPPLDYSLQRPFQELVAKDLHGTEWRFRHIYRGQPRRHLLTTGWSGFINKKKLVSGDAVLFLRGEDGELRLGVRRAAQLKNASPFPALHNQISNTSSLSEVAHAVAVKSIFHIYYNPSCTHRLSQSEFIIPYWKFMRSFSQPFSVGMRFKLRYESEDASERRRTGIIIGSREADPMWHGSKWKCLVVKWDDDVECRRPNGVSPWEIELSGSVSGSHLSTPHSKRLKSCFPQVNPDIVLPNGSVSSDFAESARFHKVLQGQELLGLKTRDGTVNTASQATEARNFQYTDERSCSINMSNNILGVPRLGVKTPSGNPGFSYHCSGFGESQRFQEVLQGQEVFRPYRGGTLSDACIRGSGFRQPDGNHAPGAAFKWLAPQGCDHHGITTSVLPQASSPSSVLMFPQTSSKMPGLEYIYGCLDRNENSRHFKIGPTQDMTRTDQTLRLWPHLISGKVLDECTRNEKLHSPVSGAEHESNNKCLNTNGCKIFGISLTEKAQAGDEVDCGNASYHSRLQSLKPQMPKSLGSSCATVHEQRPVVGRVVDISAVNTMI

SEQ ID NO: 56657 - protein, 337 aa, Oryza sativa; identical to SEQ ID NO: 49175

SEQ ID NO: 56658 - protein, 257 aa, Oryza sativa
MAAAAAAPALSLAEAAPVTAVLAPCPTPSRTFRRRSWVAAICRPALKCHHSRPLTAVVAAAAAAAAAGDSTSAGVFHGECFVVGDNIDTDQIIPAEHLTLVPSKPDEYRKLGSFAFVGLPTAAYPTPFVAPGEETTRYAVIIGGANFGCGSSREHTPVALGAAGARAVVAEGYARIFFRNSVATGEVYPLELADTGAWKECKTGDVVTVELDNCVMINHTSGKQYKLKPIGDAGPVIEAGGIFAYARKTGMIASKSA

SEQ ID NO: 56659 - protein, 354 aa, Oryza sativa
MELDEESFLDELMSLRRDGSAPWQAPPYPGGGGGGGGGGMMMSDLLFYGGDGGSAEARGGMDASPFQELASMAAPPPQHPHEEFNFDCLSEVCNPYRSCGAQLVPSEAASQTQTQLTPLRDAMVAEEETSGDKALLHGGGGSSSPTFMFGGGAGESSEMMAGIRGVGGGVHPRSKLHGTPSKNLMAERRRRKRLNDRLSMLRSIVPKISKMDRTSILGDTIDYVKELTERIKTLEEEIGVTPEELDLLNTMKDSSSGNNNEMLVRNSTKFDVENRGSGNTRIEICCPANPGVLLSTVSALEVLGLEIEQCVVSCFSDFDMQASCLQEDGKRQVVSTDENKQTLFRSAGYGGRCL

SEQ ID NO: 56660 - protein, 148 aa, Oryza sativa
MALSWGWFSRVQVQARRGRRVTRREGVRSDAPLRAKVATLATYQFNCRNKQLVFFFYRRSHKFFWRPTCLLLRFALSMFLRLRLTDNFCFLKFCEVDTSADLINNKTNAAVRRPRFIRVLLPGSFAKMVHRCLYTTTCSAVLNFVANS

SEQ ID NO: 56661 - protein, 288 aa, Oryza sativa; identical to SEQ ID NO: 37099

SEQ ID NO: 56662 - protein, 455 aa, Oryza sativa
MFDLKSSTWLPLNYKGAGPSPRSNHVAALYDDRILLIFGGQSKSKTLNDVHALDFETMVWSRVKTHGHHPSPRAGCCGALCGTKWYIAGGGSKKKRHPETWVFDILESKWSVCVVPPSSSITTKKGFSMVPLYYRDKIVLVAFGGNKKEPSDKVEVLVVLQNEHCFSWRSAPDVEPLLYEDSPPSSKELSDHLNNNCAPLYSTGSVARHSLATTVESSSGRKSLPDSLLQQPNLGSSSLRRQFRQEEECSLAHKLQKPIDDDRYKDVDDCSELPSVTNQKQRNDIYQSPDADAKAKRVGRSSSDINHQYDTKIANLIRRNMALEEQPSAAMASKDEAEKNLSLVIDSKEELEKRLSEKDREVETLKEKVTGLELAQEESNSLSNTVHADNVRLEREVAFLKAVMDETQKELHSTRGVLAGERSRAFQLQVEVFHLKQRLQTMEGRSPTPRKPQNL

SEQ ID NO: 56663 - protein, 365 aa, Oryza sativa; identical to SEQ ID NO: 35353

SEQ ID NO: 56664 - protein, 502 aa, Oryza sativa
MGSSDSQAPLLLPRGSHRKEEEEEEYAAAGKVRGCCGGDGEGGWWREATAEAGRLASLAAPMIAVALLQLMMQLISTVMVGHLGEVALAGAAIANSLTNVSGFSVLMGLACGLETICGQAYGAEQYHKLALYMYRSIIVLLVVSVPIAIIWVFIPEVLPLIGQQPEIASEVGKYALWLIPGLFAFTVAQCLSKFLQTQSLIFPMVLSSSITLALFIPLCWFMVYKVGMGNAGAALSVSICDWVEVTVLGLYIVLSPSCEKTRAPLTWEAFSGIGSFLRLAVPSALMICLEWWSYELLVLLSGILPNPALETSVLSICISTVVLVYNLPHGIGTAASVRVSNELGAGNPEGARLIVGVALSVILCSAVLVSVTLLALRHFIGIAFSNEEEVINYVTRMVPVLSISVITDSLQGVLSGVSRGCGWQHLGAYVNLGAFYLVGVPVALFFGFAMHLGGMGFWMGMVAGGATQVTLLSIITAMTNWRKMAEKARDRVFEERIPTQSV

SEQ ID NO: 56665 - protein, 339 aa, Oryza sativa
MASDPLGNVILLPLDIKLNGQNYREWASSARMQLRSYGVASHLNDDPPHEKEDEKKIAAWRRNDERVMAFLCMSAEVPIRMNFIDLSSAKKMWEYLQQRYQQSSAALRFSLRKSLQSLEQGDMTIEEFHNAFTSLSRQLDSMVPKAGGGCRQCICKEKYEEQSLMFDFVMRLRLDFEPIRVQLLGRSTLPTMAEALADLIAEETRLQSLPNATTPQHTVLASSLMGTSLSGDHAFQHGSLATSSTQIVCSHCKRSGHRVEKCFKLHPELLAEFRAKRGASRRAPSTSVTLAAPAVTAASVSATSTNQPYMNAYQPNGSASLAPAPGSSDKSTRWYWPSP

SEQ ID NO: 56666 - protein, 504 aa, Oryza sativa
MDKVGFMCKIAGQNNNLMGQFHNALYLGDAMKRVEILENAGQLPLAYITAATHGLTEIADRLAAELGENIPSLPEGKTRSLLIPPAPLTASGDWPLLRVMRGIFEGGLDATGKAELEEDDEAAGADWGDEDLDMVDASEAMANGGDGFDAEEGEANEEDGEEGGWDLEDLELPPEAETPKNAGNALSVVFVAPPPGMPVSQIWTQKSSLAGEHAAAGNFDTAMRLLSRQLGIKNFAPLKPLFLDLHMGSHSYLRALATAPIIPVAVEKGWSESASPNVRGPPALVFTFSQMEDRLKAAYKATTEGKFPEALRQFLNILHTIPLIVVDSRREVDEVKELIEIVREYVLGLRMELKRKELRDDVNRQQELAAYFTNCKLQRVHMRLVLGSAMGLCYKQKNFATAEHFARMLLENNPNESQAKRARQVQQQCSGKKDSCELNYDYRNPFVVCGATYVPIYRGQKDVSCPYCGSRFVPSIEGQLCTICELAVVGADASGLLCSPTQLR

SEQ ID NO: 56667 - protein, 259 aa, Oryza sativa
MMFSLCSTSGCPFGSSCHFLHNFPGGYQAAAKMTSHGGTAVAAPPGRMPLGPGAPNGPPTSSVKTRMCNKYNTAEGCKWGSKCHFAHGERELGKPMLLDNSMPHPMGSMPFEAPPMPGPDIVPPSTFGASATAKISVDASLAGGIIGKGGTNTKHISRMTGAKLAIRDNESNPNLKNIELEGTFDQIKHASAMVTELIVRISGNAPPAKNPGRGSHAGGPGSNFKTKLCENFNRGSCTFGDRCHFAHGESELRKPPAAA

SEQ ID NO: 56668 - protein, 305 aa, Oryza sativa
MERAVPVRKPHTSTADLLTWSATGPDAAAAAASPVASSRPSLKPAGGITPAMFGAPVSEKEAEDLSKSERKFCSGSKLKEMTGSGIFAENSENDDSEASNPANKTSVRMYQQTVTGISQISFSADGSVSPKKPSSLPEVAKQRELSGTLETDAEAKMNKQHSEAKSKELSGSDIFGPPPEIPARPLAARNMELQGNLDFALPQPRSVHTSVKVSNPAGGPSNITFSEEPVVKTSKKIHNQKFQELTGNNIFKEDATPASAEKSLSSAKLKEMSGSDIFADGAAAPRDYLGGVRKPPGGESSIALI

SEQ ID NO: 56669 - protein, 112 aa, Oryza sativa; identical to SEQ ID NO: 48775

SEQ ID NO: 56670 - protein, 170 aa, Oryza sativa
MARLLSRTLALARADSAAVPSYGRLHVRGVSSKVEFIEIDLSSEDAPSSSSSSGVEGGGFGPREMGMRRLEDAIHGVLVRRAAPEWLPFVPGGSYWVPEMRRGVAADLVGTAVRSAIGAAWNAEAMTEEEMMCLTTMRGWPSEAYFVEGKFSHPVESSRKVATQTDEEES

SEQ ID NO: 56671 - protein, 91 aa, Oryza sativa
MVIRSVVVLLSNTLVVRKISQHYCLLCHLVQARVLRCQSSALMFSPHSLAGRIKTKLPRTKFLRLIKGWIVLQYLKESGQIPLLISVLDTY

SEQ ID NO: 56672 - protein, 455 aa, Oryza sativa
MAGVGVVVDPEAVGGGGDGGGDGRMKEGLARRAVENLRFRSVWGEVNGAMGDLGTYIPIVLSLALSRQLDLGTTLVFTGIYNAITGLLYVVPMPVQPMKSIAAAALADPSFAIPEIMAAGILTAAFVLFLGLTRLMDLVYRFVPLSVVRGIQLAQGLNFAMAAVKYIRYEQDLGKGKSLGRRPWVGLDGLVLAIAAVCFIVLVNGAGEEQEQRQQQQQQQQWWRRRLGSVPSAVVVFVVGVAFAVARHPAAVRELRAGPSRMRVVHISREAWKQGFIKGALPQIPLSVLNSVVAVRKLTRDLFPERKESPTSVSVTMGAMNLVGCWFGAMPCCHGAGGLAGQYKFGGRSGGCVAALGVLKLALGLLLGGSMLRVLVQFPVGLLGALLLFAGVELAAAARDMSTRAEAFVMLLCTAVSLVGSSAALGFLCGMLAHALLYLRACALRERIVSSQTDL

SEQ ID NO: 56673 - protein, 376 aa, Oryza sativa
MRASKYGMPITANGVHSLFSCGQVVPSRCFSSGADLPPHQEIGMPSLSPTMTEGNIARWVKKEGDKVSPGEVLCEVETDKATVEMECMEEGYLAKIIHGDGAKEIKVGEIIAVTVEEEEDIGKFKDYKAPSSAESAAPAESKPQSEPTEPKKEKEQPKAPEPKATKTEESFLSEDRTFSSPIARKLAEDNNVPLSSIKGTGPDGRILKADIEDYLASVAKGAKKETAAAPGLGYVDLPNTQIRKVTANRLLHSKQTIPHYYLTVDTRVDKLIKLRSELNPLQDTSGGKKISINDLVIKAAALALRNVPECNSSWMNDFIRQYHNVNINVAVQTEDGLFVPVIRDADKKGLATIADEVKQLAQRARDNSLKPEDYEV

SEQ ID NO: 56674 - protein, 846 aa, Oryza sativa
MGKSSSKKKKDKVILPPQLPPEVDDDDVVVSDEDVEFFRGNEGHARALATLDRKSIDSYVTRVAHHDEDEVERLYEERERRRKAVEALRPKNHDDDDFEVDRVDALPVKTLQGELVYNNAKKARFDDSSNNVESKSEDKVGNSKQTIQKGERKEKSKSKKGDGKLQNVQAQTEASNGKLQSKVLEEVKEELSAEELFEKKKAQLAEIGMSMLEDPESHIRSLNDMLNICNDKDQKVVKLSLMSLLAVFRDIIPSYRIRQLTEKELTVEVSKDVKKMRYYEYTLLRSYKAYLQKLISLEKQPNFSALAVRCMCTLLDTAPHFNFRESILASVARNLSSPDDAVRKMCCETIRSLFVDEGKHRGEATVEAVRLIADHVKLNDCQLHPDSIEVFLSLRFDDDLGKDDTEEEKGKPKKNKRRQNQEVPKQLPVSDNKKAKQELISKAREEVDAELRSVSFTLDPKERRRIQKEALSALFETYFRILKHSMSISNSRGKVINVSPDGSHPLLAPCLEGLGKFSHLIDLDFMGELVACLKKLSGYTDHHSGTVHDNTLSVSERLQCCIVAFKVWRSNLEALNVDLQDFFVQLFNLILEYRPDRDRGEVLADALKTLLWEGKQQDMIRAAAFIKRLATFALSFGSAEAMAALITLKHLLQKNSKCRNMLENDSGGGSLSCLVAKYDPEAKDPYLSGALASVLWELSLLQKHYDSSVSSMASNILSMANLNPTQNPVPISNASPLEAYRDLSMERKLSKPANKLLPLNCRKKRRGKEFVALSPAALEGSDCVAGGDELKEKLKNHFAVLRGISENERLRAELNHTLSSINLYKEYKKQKKSRKSKAVKKKVSRA

SEQ ID NO: 56675 - protein, 227 aa, Oryza sativa; identical to SEQ ID NO: 54856

SEQ ID NO: 56676 - protein, 185 aa, Oryza sativa
MAPPTALSPVAFKSSFSPLLFNPTRSKINVEGAFCLPCYNRKKASNRSFRVYSLFGGKKDKDENGEEAPSKAGIFGNMQNLYETVKKAQMVVQVEAVRVQKELAATEIDGYCEGELIKVTLSGNQQPVRVEITEAAMEVGAEKLSELVNDAYKDAHQRSVQAMKERMADLAQSLGMPAGLGDGLK

SEQ ID NO: 56677 - protein, 420 aa, Oryza sativa
MEREVVVSEDAAASSSSSSSSAAAASFSLAETRVICRVCQKQFAQYTCPRCNARYCSLPCYKGHSVQCTESFMRENVMDELKQMQPEDESKKKMLDILKRFHLEEEDMDSEGEDESILSEELIQKVMSGDEIKLEDLSDDEIKRFRQALASGELSKMIEPWTPWWKKPSARSISLSPDGSQLIRQVSVEDTDTSDPMADPESSISEIPEGPESALPSLEQLTRAEPSPLLAVHLVDILYSYCFTLRLHNGDWRSDPFGASTVALSVSKVMGEDAKPETVSEALTACIEETCSPAYRHTGGFRFAIALVDDIISLLTLGGNALVCALCDFRRLIHIGERMLKAEKLGKAERSRSTQKLRAADRKLYFMTCWVHEQPNEAWSSLARLVEVQEASLEELDCGSQFQRAGRKNDAQSKVLIEEI

SEQ ID NO: 56678 - protein, 535 aa, Oryza sativa; identical to SEQ ID NO: 55208

SEQ ID NO: 56679 - protein, 371 aa, Oryza sativa
MNQLGLSIREDAVGNIFGRWEGSEAGLGAVATGSHVDAIPFSGKYDGVVGVLGALEAIRMLKRSGFQPKRSLEVIMFTSEEPTRFGISCLGSRLMAGSEGLARSLKETVDNQNVSFFDAADSAGYKMHPEELHNVFLKKDDYFAFVELHIEQGPILEKEGIKIGVVTAIAAPASIKVEFEGKGGHAGAVLMPARNDAGLAAAELALAVEKHVLESGSIDTVGTVGILQLHPGAINSIPSKSHVEIDVRDIDEKRRNNVIEKVHQSAIEISKNRGVLLSEFKIINQDPPALSDKSVISAMEFAAKQLNLEYKLMISRAYHDSLFMARISPMGMIFIPCYKGYSHKPEEYASPEDMANGVKVLALAMARLSLQ

SEQ ID NO: 56680 - protein, 111 aa, Oryza sativa
MEEAQVVESKDGTISVASAFAGHQEAVQDRDHKFLSKAVEEAYQGVDCGHGGPFGAVVVRNDEIVVSCHNMVLDYTDPTAHAEVTAIREVTCPVYCGYQLHGVYSLHFVDT

SEQ ID NO: 56681 - protein, 426 aa, Oryza sativa
MAPEPEDDIMNEKNPRPLDEDDIALLKTYGLGPYSTSIKKVEEEIKEMAKKINDLCGIKESDTGLAPPSQWDLVSDKQMMQEEQPLQVARCTKIISPNTDDAKYVINVKQIAKFVVGLGDKVSPTDIEEGMRVGVGRNKYQIQIPLPPKIDPSVTMMTVEEKPDVTYNDVGGCKEQIEKMREVVELPMLHPEKFVKLGIDPPKGVLCYGPPGTGKTLLARAVANRTDACFIRVIGSELVQKYVGEGARMVRELFQMARSKKACIVFFDEVDAIGGARFDDGVGGDNEVQRTMLEIVNQLDGFDARGNIKVLMATNRPDTLDPALLRPGRLDRKVEFGLPDLEGRTQIFKIHTRTMNCERDIRFELLARLCPNSTGADIRSVCTEAGMYAIRARRKTVTEKDFLDAVNKVIKGYQKFSATPKYMVYN

SEQ ID NO: 56682 - protein, 345 aa, Oryza sativa
MDRPRRPGSDRRYPPLRFRKRKRSSSDSRSSKLNNKPGSDKWEDVCSICDDGGDFLCCEGRCLRSFHATEEHITEINQCTTLGLTEEQWKIFRQNDEKSEPLYICKNCKYNQHQCFSCGLLGSSDLSSGAEVFQCEDEKCGHFYHPKCLARLLYPDSSMQPLNFEEEVARGLKFLCPVHKCHVCKGGENKNDMENQFAVCRRCPTVYHRKCLPSDIVFEDDESNGIVQRAWDDVLRDQILIYCMKHEIDPELGTPARNHIIFPDCKNLLTRGPSKPKGQEDAPAVLDIPEEDMSPDHSSEPSQPPPQPAAETDQTDQDLSNGFNSFAPKALFPLPYPGSCGWLDD

SEQ ID NO: 56683 - protein, 343 aa, Oryza sativa
MKEMEERGFAVDLVTVTSLLIGFNKSRRWDLEEQIVKFIRDSSVLPDAIRWKSNMMSALQGPQDREKDGTSIFPFDGNIDDVMSLVNPVVCTGANEETPKDEPKDDWSLSPHLDHLAKHADHLNSSAIFTIDRGQRVQGMGAKTFDADMVNTYMSIFLAKGKLSVACKLFEIFTTLGRKGTSYTYNSLMTSFVKKGYLKQVWAILHERGGQLCPNDIATYNLIIQGLGQMGKAEVAGSIISELSKKGVYMDIVMYNTLINQLGKAGKVDEANSLLEQIIGRGIKPDVVTFNTLININAKAGRLKEADKYLRKMIAEGIAPNYATETILVFLDKEIEKKRQQPR

SEQ ID NO: 56684 - protein, 649 aa, Oryza sativa; identical to SEQ ID NO: 51665

SEQ ID NO: 56685 - protein, 320 aa, Oryza sativa
MHIFGPIGNGASSVVQRAVFIPVHRILALKKINIFEKEKRQQILNEMRTLCEACCYIGLVEFQGAFYMPDSGQISIALEYMDGGSLANVIKIKKSIPEPVLAHMLQKVLLGLRYLHEVRHLVHRDIKPANLLVNLKGEAKITDFGVSAGLDNTMAMCATFVGTVTYMSPERIRNENYSYAADIWSLGLAILECATGKFPYNVNEGPANLMLQILDDPSPTPPKDSYSSEFCSFINDCLQKDADARPSCEQLLSHPFIKRYENTTVDLVAYVKSIVDPTERLKQIAEMLAVHYYLLFNGTDGIWHYMKTFYMEESTFRYLW

SEQ ID NO: 56686 - protein, 481 aa, Oryza sativa
MHSQTPAKPKASPVRSRPQLPASAAAAAAAAVEPPLQLQQLHTTPPPPPPPLMPAGGEVTGGSKAAKKRGMQKLLKSAFKRGDHHAPAGASSGGGEQSGDDEAAAAAAQDLSRSSSSSTGGSSGRKGRKGDSSVEGDLSSRDSLELQESKNVKGAAAALRNAKLSHSYEAFPWERKMRDLLQVAGASGFLSLLLLPRATDETQTKFHSLEDTLARAESWLMSSQMSGVPIVPMNVQTEALLTKICGDVASSTVNMNSLGDLANMATVSLYGFEDYHGVDIGVVRAIRLWYAPFAGEMALEIKLQPGDTRLGFAISRTEEGFIYVSSVAEESTPGVASTRSGLLELYRRARRASKLLVVSRVGDDKVLPWATSTAGDIRCFDTVSLSQRLSLHRHALRPVTLHFLMWERLPPAAVIRGGAAARPTVQMIVQGDEEGGGDAADESTDEVGFDGDGPEIVLSGKDDSDDRSFRFQNIGLPDSWL

SEQ ID NO: 56687 - protein, 289 aa, Oryza sativa
MEGKEEDVRLGANRYSERQPIGTAAQGAGDDKDYKEPPPAPLFEPGELKSWSFYRAGIAEFVATFLFLYITILTVMGVSKSSSKCATVGIQGIAWSFGGMIFALVYCTAGISGGHINPAVTFGLFLARKLSLTRAIFYIVMQCLGAICGAGVVKGFQQGLYMGNGGGANVVASGYTKGDGLGAEIVGTFILVYTVFSATDAKRNARDSHVPILAQLPIGFAVFLVHLATIPITGTGINPARSLGAAIIYNKDHAWNDHWIFWVGPFVGAALAAIYHQVIIRAIPFKSRS

SEQ ID NO: 56688 - protein, 555 aa, Oryza sativa
MAAAILRFFFFFFFFILPASLTATASTSTSSCPDGWQITPALDKCFIYIPTPLSWDRSEALCRNNFTAHLAALSSLQDLNLAKSLCGPSPSGCWVGGHRNNTASAFAWKWSDDSSSWNDTAFPADQLRANCSTTGCALATTNDACTLVTNTHAALTAKRCSDSHGLICMINHEDRCYHDHCHKEYFIVLVVVSGFILLTTLAVVVWLLVYRRSKRRRRSREGSSTSATALVPPLWKVFTSEELRSITKNFSEGNRLPGNAKTGGTYSGILPDGSRVAIKRLKRSSLQRKKDFYSEIGRVAKLYHPNLVAVKGCCYDHGDRFIVYEFVANGPLDVWLHHVPRGGRCLDWPMRMRVATTLAQGIAFLHDKVKPQVVHRDIRASNVLLDEEFGSHLMGVGLSKFVPWEVMHERTVKAATYGYLAPEFIYRNELTTKSDVYSFGVLLLEIISGRRPTQSVESVGWQTIFEWATPLVQSHRYLELLDPLIQELPDVGVIQKVVDLVYACTQHVPSVRPRMSHVVHQLQQLELKSAASEQLSGTSTSATSPMLPLEVRTPR

SEQ ID NO: 56689 - protein, 161 aa, Oryza sativa
MTSSSSPSRKVLSKIACNRLQKELAEWQVNPPSGFKHKVTDNLQRWVIEVAGAAGTLYAGETYQLQVDFPEHYPMEAPQVIFLHPAPMHPHIYSNGHICLDILYDSWSPAMTVSSVCISILSMLSSSPAKQRPADNDRYVRNCRNGRSPKETRWWFHDDKV

SEQ ID NO: 56690 - protein, 608 aa, Oryza sativa
MAYNYPSEKISVYLSDDGGSILTFYALWEASIFAKKWLPFCKRYNIEPRSPAAYFSESKVHHNLCIPKEWALIKNLYEEMRERIDTATMSGKIPEEMKLKHKGFDEWNSDFTLKNHQPIVQILIDGKNRNAIDDDRNVLPTMVYVAREKRPQYHHNFKAGALNALIRVSSVISDSPVILNVDCDMYSNNSDSIRDALCFFLDEEMGQKIGFVQYPQIFNNMTQNDIYGNSFNVSYHVEMCGLDSVGGCLYIGTGCFHRREILCGRIFSKDYKENWNRGIKERGKENINEIEEKATSLVTCTYEHRTQWGNDIGVKYGFPAEDIITGLAIHCRGWESAFINPKRAAFLGLAPSTLAQNILQHKRWSEGNLTIFLSKYCSFLFGHGKIKLQLQMGYCICGLWAANSLPTLYYVVIPSLGLVKGTPLFPQIMSPWATPFIYVFCVKTLYGLYEALLSGDTLKGWWNGQRMWMVKSITSYLYGFIDTIRKCVGMSKMSFEVTAKVSGHDEAKRYEQEILEFGSSSPEYVIIATVALLNFVCLVGGLSQIMAGVWNMPWNVFLPQAILCGMIVIINMPIYEAMFLRKDNGRIPTAVTLASIGFVMLAFLVPIV

SEQ ID NO: 56691 - protein, 93 aa, Oryza sativa
MAPAHGRRLASKGGSGNHALPSARSGGRAGAVRGPPPTSTARRPPRRYLIFPFSPHPERSIHSPSPQAIPRFPFAIRTQLPSKIRFPNHCSVA

SEQ ID NO: 56692 - protein, 79 aa, Oryza sativa
MTRGEKGMQPKISAFFKRQAPEPETSRFFILVPSSNLLAVAIRYQILPDSILVANFCNIPSIRANIKIARQVGKKWLLI

SEQ ID NO: 56693 - protein, 35 aa, Oryza sativa
MFVCVFDDIFPYSIFVVAGYPRSPFHPVSISSSSW

SEQ ID NO: 56694 - protein, 525 aa, Oryza sativa
MSSFWGAEVKPGKPYTHTHIPRLGRLRLTQATLGGEAGKVEKGGGGKKNVVQLQCTVKNKDPVFLCALVPGQSETCHLELEFEEKHVTFSVLGPRSVHLAGYYIGDVYGEEIDDSDTGSDSLQGSDDDAFLDTDDDDSGADDGTVLIPLSPGNSDGEDDDSEYDSEDDDSEMIYNQRRGKSSVVIEEIQEDDKPAAGGAQKGSNKKQTSENGDDSKLQLVVRTPPAESLESEDEDGFPVSFSESKKRTDGSSKKKGNLNNKMSTEDRKRKSSAVGDHHDPSGEVKDENDGVSKKNKKAKAKKTAVGGVEKEIKQEDSPADLVDAKQKKNKNKNTSEAEAGAHQNTDKTKHIHTDAEEDTAQEASKKKKNKKKKTQEKNESENQTPKTQEKNAKGNQTSNTDLTGSESKKQPLQTRTFGNGMIIEEIEMGKPDGKKASPGKKVSVKYIGKLKNGTIFDSTVGRRAFDFRLGIGEVIKGWDIGINGMRVGDKRRLTIPPSMGYGNKRMGPIPQNSTLVFDVELVNVK

SEQ ID NO: 56695 - protein, 434 aa, Oryza sativa
MFIGHLGNLPLAAASVGLSVFATFALGFLLGMGSALETLCGQAFGAGQVSMLGVYLQRSWIILLGATVLMVPVYVLAEPLLLLVGQDPEVARAAGRFTLYILPGAFAFAVNFPSGKFLQAQSKVGVLAWIGVAGLAFHVGITYLAVSVLGWGLPGAAAAYDVSQWASSLAQVAYIMGWCREGWRGWSMAAFHDLAAFLRLSIESAVMLCLEIWYLGLITVLTGDLDDAQMAVDSLGICMNINGYEGMIFIGLNAAISVRVSNELGSGRPRAAMHAVVVVVAESLLIGLLCMALVLAFSDKLALVYTSDAHLLRAVSRIAGLLGVTMVLNSVQPVLSGVAVGGGWQGLVAYINLACYYLFGLPVGYLLGYYFNLGVGGVWGGMLCGVALQTLILLFVVWRTDWKAEAAQASARVHKWGGTDETKPLLQGDHSDRD

SEQ ID NO: 56696 - protein, 459 aa, Oryza sativa; identical to SEQ ID NO: 45879

SEQ ID NO: 56697 - protein, 889 aa, Oryza sativa
MKQVREVAFDAEDCIDTFWCYIGHHYGARGVRCYCVPKVVYTLKTLKVRNNLAIKIQSLRTRVQRVSERRLRYMLNPTGSTSKSTNGSLSSSNYIDQERRLSALNIDESRLVGMADKTEEVTKLLDEGHVPNLKVVSVVGFGGLGKTTLAMTVYKSPAVKGIQSRAFVAVSQNYDPRALLESLLKQLIQRPFLREPRSVDEETSTEDPLKGIETWDICQLINRCRNYLENKRYFIVLHDLWRPEAWMTLKIAFPDNDKRSRILITTRNHLVAQICCYYPHDCIYSMEPLPSEESRHLFFKRVFKLDKCPSQYQDLVDISDAILRKCNGLPLAIVSIGGMLARMKNKTYAEWQKVCDRLDCGLEINNTVGGMRKILSLGYNDLPYHLKACFLYLSVFPEDFEIKRGPLIRRWAAEGFIGRVRGSNLEEIADKYFDEFISRNIVTPIRIDSSGEVRSCRVHDIMLEVISAISVQENFISLLGNYSYSITGHDKIRRLSIHVGGGKEQDFSCRNLSHLRSLTILGCKEKPIPIALADLTLLRVLDLEGCGWLSDSDLKDICKLYLLRYVSLRSTNISKLPRTVGNLKELLTLDVRSTYIRELPATITQLRCLKHLLAGRYKYYTRTHHVKHFASKEAVTIPAGLKNMSALQSIAPVNISSSFRAMHELGELSQLTKLCAINRKGVEKWRPFATSLSKLSNSLRHLSVIHIDKMEHGLEFLMDLSSPPLFLKKLYFWGRVSALPPWISSLSNLVRLSLRENYLESELVKILGKLHSLLSLKLYVNSYLGTELCFEHNLFPRLKQLMIDNLKNLDELSFKGGAPDLERLTLAFVKAPERGISGIENLPKLKEVEFFGIIVDSVVEGVIAAAKIHPNHPRVYRDETIDPRSLTTA

SEQ ID NO: 56698 - protein, 120 aa, Oryza sativa
MRGERKRKEKERKIDSCIFQYLRLSPSVINCKVHTRHQIPRAFGTPCLFLVIYLVLCPGFIWFFSSILILAQLTHVLASDDAWMDGSHGVLAQFVGNPGVGSIQLRSARHHRLLGRSPPS

SEQ ID NO: 56699 - protein, 353 aa, Oryza sativa
MGIKGLTKLLADNAPKAMKEQKFESYFGRRIAVDASMSIYQFLIVVGRTGMETLTNEAGEVTSHLQGMFNRTIRLLEAGIKPVYVFDGKPPDLKKQELAKRYSKREDATKELTEAVEEGDKDAIEKFSKRTVKVTKQHNEECKRLLRLMGVPVVEAPCEAEAECAALCINDMVYAVASEDMDSLTFGAPRFLRHLMDPSSKKIPVMEFEVAKVLEELELTMDQFIDLCILSGCDYCDSIKGIGGQTALKLIRQHGSIESILENINKDRYQIPEDWPYQEARRLFKEPNVTLDIPELKWNAPDEEGLVEFLVKENGFNQDRVTKAIEKIKFARTNLPKEGSNPSSSQLLAHQCL

SEQ ID NO: 56700 - protein, 289 aa, Oryza sativa
MEDKKRRSDRGNRGDKDEKYLKDPMEDKKLDVSSVAHKRSSSASEDEMLNSNSKRSKHDAALECHERKDEDHIEEDRRDLDSVGSKSEKRSLGNGDHEKQNHDTNRKTDKSHDRDDSSRKDRKYREDESRHSRDRCSRHSSSRSHRSSRHSREKYHGDTTDQHKSKKSEEGSKSRKDDCLLDDTLSSDRRKVQSEDSPRRKHNQLAASSDVHGINHDTGVKVPNDFSEADQGIQEAKQVVHETDMSSAPRLEDPFLAQDKQDKPIVAGLNGLHEPGVDGAFVGTEESAI

SEQ ID NO: 56701 - protein, 281 aa, Oryza sativa
MPPAGSLTDEQLRFFDANGYLVLGSFSSAEEVRAMRDRMAELVDGFDGAGDVFSTKDHRQVKNDFFFKSAENISFFFEEKAFGDDGCLKQAKELSINKVGHALHELDPVFKKFSFGANVSSLFSSLRYKRPAVIQSMYIFKQPGIGGEVVPHQDNTFLYTDPPSCTGLWLALEDATKTNGCLWAIPGSHKNGLKRRMIRDEIDTHFDHPSPTYDLKEFVPLEVKSGDLVVIHGDLIHQSFENLSPVSRHALSLHVIDTEGCEWSKQNWLQRKIPPQPLYEN

SEQ ID NO: 56702 - protein, 261 aa, Oryza sativa
MAAGEGDVGMEVETKAPAMPPPPPASSSAARKKKQARAKNGDTPEPDAAGGARARASRRAKRGPGSYRGVRQRRWGKWVSEIREPNRGKRHWLGTFGSAVDAALAYDKAAASILGPRAVLNFPAFSPPAAAIAAPEQCEPPFRSPATTAAATAPEQRQTPGCSPAAVAGSGGGAVFEERDVKPVVLPLPLPAILQDGGGTEAMAQHWDWEWDASWPELEMFECLDDIAMYLDVDAVMTTRDCKVEELDADIVDSPLWTLSD

SEQ ID NO: 56703 - protein, 185 aa, Oryza sativa
MEVARQIALADEARRKAEEQRKAQLERRKQEDELKQVMQQEQHFERVKEQWKTSSNTPGKRKDRSKHEDEEGGGEKRRKKGGRRRKDQKTKAHYGEEEEDEYRDEPEAEDDYANTARSNDGGDSEKAPGHLLAAAGLEDSDAEEDDMGHPQSAIERKRRAWSESEDDEPVQRPVQPSAGENDLSD

SEQ ID NO: 56704 - protein, 491 aa, Oryza sativa; identical to SEQ ID NO: 54552

SEQ ID NO: 56705 - protein, 146 aa, Oryza sativa
MTLARPEDRDNISCAATVNQQSHAHNRRLQASLRRLRRQHPAAVIAYADYYAAHLAVMAAPARYGFTEPFKTCCGAGGGAYNFEIFSTCGSPEVTTACAQPAKYVNWDGVHMTEAMYRVVAGMFFQDGRYCHPPFSTLLARRNKGN

SEQ ID NO: 56706 - protein, 545 aa, Oryza sativa
MSDMESMATLMESTGSKLQQLQRAFAELESQSAVSLNLKWKQLEDHFHGLEQSLKKKFDDLKRQEEEFEETVAKSEQMLEQQEAVVVAKELTSLEKLQQKRDAALAVIFGKSKLNLSTPLINPISKSVNNNAVFNGNIGGSLSVKWPKPATAHGAYLQDENTAVKPRSQLVVLCEEMNVNGLHKFISDNRKDLTSIREEIPVALRGATDPYGLVLASLEDFYFGDNLILDGKKDGNLLGVRRTCLMLMESLAQLQTDATTGFISEGQVLTASIKERAKKIALEWKSKLDSLDFDASNGNCLEAHAFLQLLATFGIFAEFAQDELCKLLPSVSRRRQTPELCRILGLSQNMPGVIGVLVENGRTIDAINLAYAFELTNQFEPVELLKAYLQEVKSVPHFKTGKISLQVQNEMNERELSALKAAIKCIEEHKLDEKYPIDLLQKRVIQLEKAKADKRRAVEAAKPQSKRPRANGSVYAPHTSFPDKSFYQAAPPQRHSYPYERQYVYGAEAHHHPTMISSAPYGISPAHTTYYGNGYQVQYQVPYIH

SEQ ID NO: 56707 - protein, 253 aa, Oryza sativa
MEGDTLLADIQLALPNRCYLLPSGMHKSNTSSCPTITCEEALKRELEYRQKIERSHPHLLVGLNGSPALLNEVGSGSSPDLSMRNSAHDSYMPSPQACFVGSTVQRPPANWYPSKKKLKVLQHPSQALQAPRPNLIPSFWCKICKVDCVTEFNFGAHIGGKKHKAKKLEILGNRNNARPATGNQCTGNRNPRPNGNAGSGSRNNEPNVFNSNIAQPSSDTFSGSQTNGTIGNPHKEMSSDGDGISNSKLEQNC

SEQ ID NO: 56708 - protein, 587 aa, Oryza sativa
MVMDPLTNKAAFSGLRQYVKELDSNTLPPFLARVCDPVKPCSFSEEEMLCIFETAAQAHGRKIVPHIALIVSAIVRMMSSRNAVGCSKVVCALSRYVVDPLATEALKSAIIGSLCRPFADCLMSTKVESNSFGSALCVAALVQSNNWRFASNELVNDVCLKVSGALEEAHAQSIAHLNLVVVLLTQNPLMLEPYGRSLIRSGLQILDESAKASSSQMIISSIQMIHSIMKGLDLGIISSEISSIIHAMEQFQDDTMPAISIAAFEASETAKLLVGRQKESGHDNNLSQLANYSVRNGRKGSYSHSLMDDADIRDDGSCDSHSCDLNSVHLSTDFDSQHSVGQCGSGSTRARRQLWCNKSDKSHGMSNHDLFRTVIPDSHEASGLMAHFSSVDPIKPDRRLSDVPTRVAGPCYVCSAAHETNHCSQISRAQVLSGDMRMNSTPRKQLHSCTFCRDPEQDGHPPLESPAIQHCSGPGTNILQFRKNSELKERKEFWDSIRQENQCHMQNTDALIEDLKFPADDDDEDFDGAAKSPCQECQAVNEKKTGGKKRNANSSHYPVFLFVFVVAIIALFFPWWKDYKEPYVVPT

SEQ ID NO: 56709 - protein, 422 aa, Oryza sativa
MSSHHRYAHLLDDPFFPFPPPSSSSCPFLSPPAASSTCPFFALDSPFAADPFHLHPFLPTPPTSSLLDPFLLHTLTDRVSQLELALAARAPHPRPTSRKCTYVTESTGRKVKWTTEDKPRAGERVLKWEAELDSPYDDGFDRKWKWEAKAKTASAAATKLKWATHLKGKGCLEPWSHSYTWEEDFSATDDDDDEEIEDQLHHKALQDHSKLKTKAKDDKKKKKKDNNTVVVNKEQKKCPFSVKIEEIPPEEDNTAGCVAIRKAFALGNGKAKKKELSPQDAALLIQLNYRAHLAHRSQVLRCLRDLAVAKAKLKEIRSLFYNISYRHRMAHDHEERQRFTEKIIVLLLTVDALEGPDYMVRTAKKSMLDELEGMLEIVDPQPPGKQRSLTRRKFDLPEGGPITDEKMAGVNNAVKVIQKGKK

SEQ ID NO: 56710 - protein, 313 aa, Oryza sativa
MQASARLYTAAASKRVIAGVSSTISRSCHRTCRWKSHAAPLSAQEAPKGPKRMTKQERRVKIEKFVEEYKASNDGKFPTMTTVRQHVGGGHYTVREIVQELEYNQRMLQLDQSKAAELPETAEHSEHLKPKDVHGNAQFNSESFSGNQNTDDLHLSQKVAATSTEIIDKTETWGLEESQMTSGTSHYTGETEAVKQDLHTADSLQGANESIKSCQTESDSIKNEDSISLGLDTKSDPTDLELGESKSDKIELNSTARFKNVSEPPVSDPIEGDKTVKANVLDREENPEVEPKTGLFGSLKSFASGIRNFWRKL

SEQ ID NO: 56711 - protein, 208 aa, Oryza sativa
MAEDGFRRRELLLVGDVSRWFLCLIQREYVRLVDVESAGHGVLAAPRLAGALARQVTLRLRPPARGCAASDVVIVGVNQVAKDGAPEHDKAVPRCGEPVGDAAAVVRRAVVPTDCFEAVVVAVASRVDEDPDLAVGDGKAHQLFLTIIQVVEVRSVAVALELEVFVPGAAGANAEGVGDADVPALVGAARPWLSRCRCHRRQADEHDG

SEQ ID NO: 56712 - protein, 434 aa, Oryza sativa
MAPATQMAAPPPRGGSFRVLRTARVAPSSPDGVPSLRQRAVPLTFLDAMWLPTPPVDRVFLYRLGAADDDVDAVLSRLADSLSRVLHVFYPLAGRLRLTPGKTNRYELFYQPGDAVAFTVAEHDDGVGVDELAADDPREVAKIAPLAPELPDGGAVLAVQATVLPPARRGLALGVTVHHAACDGSSSTHFLHTWAAACAGAVVLPKPPVIDRTFIREREDLYDIMVNRTKEESDKFSSPDVADNKLLATFTLSGEILQNIKDIVAAPSVHVHRRDVRRHMAVPHPRRTSKRRRSREQPSKPWPCPLRLPHRSPGADGTPRPRQVPRQLRRAMLRLGAQERDRRRRRGGRPLHDLRRDRRRHRRRNEIRSRLLGEVQGARQRDEHERRPAASGGRVAEVPRVRRGLWVREADEGGRRVRGEDRGDLGGGGPRRRH

SEQ ID NO: 56713 - protein, 620 aa, Oryza sativa
MGTGSYSVQLYTNGTRRVTLEHRNPSIEYWYWSPDESGMKIPALKQLLYMNPQTRGLVTPAYVNSSEEEYYSYNSSDESSSTFLLLDINGQIKFNVWSQDKHSWQSLYTQPVDPCRSYDTCGPFTICNGNSQPFCDCMENFTRKSPRDWDLGDRTGGCSRNSPLDCTRNTSSTDIFHPLIHVTLPRNPQTIQEATTQSECAQACLSSCSCTAYSYQNTSTCSIWHDELFSVNQDDGIEIHSQDVLYLRLAAKDLQSLRNNKRKPNVAVVIAASVIGFVLLMVGMFLLIWRNRFEWCGAPLHDGEDSSGIKAFRYNDLVHATKNFSEKLGAGGFGSVFKGMLIDLTTIAVKRLDGDRQGEKQFRAEVSSIGLIQHINLVKLIGFCCEGRKRLLVYEHMLNGSLDAHLFQSNAGTLNWSIRYHIALGVARGLGYLHQSCHACIIHCDIKPQNILLDASFTPKIADFGMAAFVGRDFSRILTTFRGTVGYLAPEWISGVAVTPKVDVYSFGMVLLEIISGRRNSPNEYTSDNYHVSYFPVQAIDKLHEGDVRNLVDPQLCDDFSLEEAERVCKVACWCIQDDEHDRPTMSEVVRVLEGMQELEMPPMPRLLAALTKCSDVGSI

SEQ ID NO: 56714 - protein, 199 aa, Oryza sativa; identical to SEQ ID NO: 55222

SEQ ID NO: 56715 - protein, 676 aa, Oryza sativa
MAASLLLRAVRRRDLASPLGTLTANVQSKCAANVCSRWAGFARTFSAKATGNEVIGIDLGTTNSCVSVMEGKNPKVIENSEGTRTTPSVVAFNQKGELLVGTPAKRQAVTNPQNTFFGTKRLIGRRFDDPQTQKEMKMVPYKIVKALNGDAWLETTDGKQYSPSQIGAFVLTKMKETAESYLGKSVSKAVITVPAYFNDAQRQATKDAGRIAGLDVQRIINEPTAAALSYGTNNKEGLIAVFDLGGGTFDVSILEISNGVFEVKATNGDTFLGGEDFDNTLLEFLVSEFKRTEGIDLSKDRLALQRLREAAEKAKIELSSTAQTEINLPFITADSSGAKHLNITLTRSKFESLVNSLIERTRDPCKSCLKDAGITTKDVDEVLLVGGMTRVPKVQEVVSEIFGKAPSKGVNPDEAVAMGAAIQGGILRGDVKDLLLLDVTPLSLGIETLGGIFTRLINRNTTVPTKKSQVFSTAADNQTQVGIKVLQGEREMAADNKLLGEFDLVGIPPAPRGMPQIEVTFDIDANGIVTVSAKDKATGKEQQITIRSSGGLSEAEIQKMVHEAELHSQKDQERKALIDIRNTADTTIYSIEKSLGEYRDKIPAEVASEIETAIADLRNEMASDDIEKIKSKIEAANKAVSKIGQHMSGGGSGGSQAGSQGGGDQAPEAEYEEVKK

SEQ ID NO: 56716 - protein, 175 aa, Oryza sativa
MAATAPRLLLMALMAATLAGRSEGAWCICRQDMPDSTLQKTLDYACGDGADCKPIQQSGACFSPDTVKAHCSYAVNSFYQRNNQNSQACVFSGTATLVTTDPSSNGCMYPASASAAGTGTPTSGTGGSTGVDGPPGMGLGPSSFNDNSGASLLPEVGTAMWILILACSIMVLNFS

SEQ ID NO: 56717 - protein, 711 aa, Oryza sativa
MDPAPATPRWNLERPYLTGRFHQEAKVAAAAQGAGSKPYSLDSFSRGGGGGGGAESVIGSYAVSVQELLVIDDLLSALVGIEGRYISIKRVRGKEGYVVFQIDSSMDLALQELTRRIFPLCEDFVLVYHFVESRSHFKSGLVNHALAAALRAFLLDYQAMVAQLEHQFRLGRLSVQGLWFFCQRMMSSLNALAVLVEKAISNNTSGSATLNLLQSQAKAMAGDSAVRSLLEKMTECASAAYLRMLERWVYEGVIDDPYGEFFIAENKSLQKESLTQDYDAKYWQQRYSLKDGIPSFLTNVAATILTTGKYLNVMRECEYTVQVPLSESSKLMGFGSNHQYLECIKSAYDFASGELLTLMKDKYDLIGKLRSLKRYLLLDQGDFLVHFMDIAREELTKKPEEISVEKLQSLVDIALRSTAAASDPSHEDLTCCVERSSLLKKLSTLKDLDCAYPSDKLVAADVDHPMPLSVTGLETFCLSYKVQWPLSLVISRKSLTKYQLIFRLLFHCKHVSRQLCTAWQIQQGFRSVKILGTPVLRSSILCRSMLKFVNSLLHYLTFEVLEPNWHLMHDRLQTARSIDEVIQIHDFFLQKCLKECLLLLPELLVKIEKLKALCLQYATSIQLLIPSIDVAKPENTSKSRMPRSKIKETKNRGQQLKLASENVVMSESILKFEAEFNSELQSLIPTLSNSSQAEPYLTHLGQCILGVGVDQ

SEQ ID NO: 56718 - protein, 241 aa, Oryza sativa
MGMRPGWVGGLVEESFFVGCPAHESRKKNEKNIFCLACCTSICPHCAPSHRHHPLLQVRRYVYNDVVRLGDLEKLIECSYVQPYTINSAKVIFLKPRPQSRPFKGSGNVCLTCDRILQEPFHFCSLSCKVDHVMVHGGGDLSNIILLHPHHHPNTATASAFPRFEDLRVGADDDAAAITAVTPEGRYGGGGGGSSDNGGGDGGGGEVGEVKRKKKKGGGFFPQILGLGSRRKGAPHRSPLS

SEQ ID NO: 56719 - protein, 637 aa, Oryza sativa
MMEAKDGQAWLGTNGYGSRREEDGVCHDDSATPVRANTVDELHSLQRKPQVVEDRHRLQLQSISASLASMTCGIGPKLVNGDPARKKEMAGKAVTHHQHHITVPTITVSDSDLKFTHVLYNLSPSELYEHAIKYEKGSFITSSGALATLSGAKTGRSPRDKRVVKDETTDDLWWGKGSPNIEMDEQTFLINRERAVDYLNSLDKVFVNDQFLNWDPNNRIKVRIISARAYHSLFMHNMCIRPTYEELENFGEPDFTIYNAGQFPCNRYTHYMTSSTSIDLNLKRREMVILGTQYAGEMKKGLFSVMHYLMPKKQILSLHSGCNMGRGGDVALFFGLSGTGKTTLSTDRNRILIGDDEHCWSDNGISNIEGGCYAKCIDLSQEKEPDIWDAIKFGTVLENVVFDEHSREVDYTEKSVTENTRAAYPIEYIANAKIPCVGPHPKDVILLACDAFGVLPPVSKLSHAQTMYHFISGYTALVAGTEDGIKEPQATFSACFGAAFIMLHPTRYAAMLADKMNKHGATGWLVNTGWIGGSYGVGERISLAYTRKIIDAIHSGELLARSYKKTDVFGLDIPTKVEGVPSELLDPINTWEDKDSYKLTLLKLSDLFKRNFKVFANYKKGGVSDLADEIAAAGPNF

SEQ ID NO: 56720 - protein, 308 aa, Oryza sativa
MFKSWIWAFATVSSRTLHIAWDDAGCLCPIGDLFNYAAPNDDNSSTDEDRDDMMHQETNKMLDQTDFDSSEKLTDGGYEDVNEYRLYARKRYRKGEQVLLAYGTYTNLELLEHYGFLLGENPNEKIYIPLDLDLCMIGSWPRDSLYILPNGHPSFALLCALRLWTTPRNRRKALSHQIYSGSLLSVENELEILKWLVKKCKETLQQLPTTIEFDDNLLVLLCKLQNSTSCITEMNRSIFEQEFAPFFRFHGFKLDCSIHSKLPVRLLRSLERWGLAVQWRCNYKRTLTKCIVHCKSLVHELSLQQNQQ

SEQ ID NO: 56721 - protein, 819 aa, Oryza sativa
MAAPATPRLLLSPTSKDLIAAASSSFPSPPSPTTSSDPASPLDAFASDPVLSAFLSPSFSPSDFSSAALSSGLAASRAEQLQEAIRLLRRHLRAEVLRRHPLLLSHLLSLRSASASLSSLPSHLHLLSSHLSLLSSHLSAPRAHLAHSSSSLSTLLSTADLLLHSHRLVRLSSRLLTSTPPPDLARQAELHREIRLLYEEKNLAGINAVDEEMRKVDAAASKLRSEASAVIDRGIAESNQNDVWCGLQVYYNLGELKPAVEGLVAKYKAAGAKSVAVALDMKAISMAAGGGGGPGGVQRSGTPQIGGSKKAAEALWDRMRQCMEELHRSVTAAWQLQTVLTKKRVPFTQMLFLEEVWQEGDPLLTERVWDAIVKAFASQLKSAFTASSFVKEIFTLGYPRLFSMIENLLERILRDTDVKGTLPALTPVGKNHMTAAIEIFQTAFLALCHSRLSDYINSIFPMSGRGIPSKDQISRLISRIQEEVEVVRTHGHLLARVLQEIGKVLLLLAQRAEYQISTGTEARQVTGTVTPAQLKNFALCLHLQDVHTRISSIVSTLPNVTSEKLSKSLEAIYTVACDSVSPLFKEMFDRLGSCILKMHEQDFGTHGMDATMDNNASAYMEELQKCAVHFRSEFLSKLLPSSSSRSETICTIMVRSMASRVLILFIRHASLVRPLSEAGKLRMTRDMAELELAVGQNLFPVEQLGAPYRALRAFRPVLFLETSQLEKSPLLQDLPPSVILHHLYSRGPDELQSPLQRNKLTPLQYSLWLDSQGEDQIWKGVKATLDDYEMKVRSRGDKEFSPVYPLMLQIGSALSQAKG

SEQ ID NO: 56722 - protein, 77 aa, Oryza sativa
MGSFLRKQPSFLLILLILHLGAREASALSSDDEAHLAFKKAVTTSDGIFLNWREQDVYPCNWKVVRCHSHTKRVIYL

SEQ ID NO: 56723 - protein, 868 aa, Oryza sativa
MSGAGQSRGHRLGLHIDSDWPEVLLINDYAVFMGYLSMVVTGTGFLVLTWSTVILLGGFVSMLSNKDFWSLTVITLVQTRIFDVFLNGKVSHIGYSLKRLCKAARFIALPHNHKKVGFRGAVRVLVFTIVLCPLFLLYMFGLFVSPWISLWRLIQQDYGVTAGDSSSKAHLQPALVVLYSLALFQGVLFYYRAISAWEEQKLVKDVADKYMFDTVSRSSVSDYLHEIKVGCENDPSFARGRNLITYAVKLMESTSPDGYLSGARILDTLIKFNRDDASGSELPGQSMQIYNMIGSASSSPILHNLVQMLDFKSAYDGEIRLRAARIVEHFAGEVRLDKILQGIRCVSSLLELEQKGFQNDHHSSFQEDDGDQLSFEEEDDHQISVKEKDYYPKDYKQMQLTGMQILLKLSYDKNNLFLMSNTDDPALINKIVALITSKGSLHKKQHNEWSCMAELGVKILSRFMRFMYGPTKSNNILWHEISTSSKAIGTLESILECDQCDSVLKKHAIRILKRIFMDTSSAMGEGDRERFIGSLMDMSLHNSNGDFQNLAGVDLALKKQGLSILKEIYLNPSSIMGEGDRERFIGSLMDMFLDNSKGDFGNLPGEDLDLKKQELSILKEICMDPSSFMGEGDREKFIGTLMDMFLHNSKGDLFEKLAGDDLVQICRRSGSSATIILRKYGHDIVDCIADTRSSVYSSMHRKIAAKILNHLCSPYSTDEEHLQNLKEAIIDLIPKVLREALGWGLTGEEILRVAVSGLEGTQDDDWKLQEALASLCATVFNRIVSKDADLTARFNNIAAGICDQTTKPRMTFADLINEAVKVHRIEFKKPEKPKPAARPELYEFVTAKYTPPHFMFLGEEDPNACCIS

SEQ ID NO: 56724 - protein, 295 aa, Oryza sativa
MFGFGAPLAVIMAIGMWNLPPSPRWLLLRAVQGKASVEDNKKKAIQALRSLRGRFRSDRVLADEIDDTLLSIKAAYAEQESEGNIWKMFEGASLKALIIGGGLVLFQQITGQPSVLYYATSILQTAGFAAASDAAKVSILIGLFKLLMTGVAVFKVDDLGRRPLLIGGIGGIAVSLFLLAAYYKILNSFPFVAVGALLLYVGSYQVSFGPISWLMVSEIFPLRTRGRGISLAVLTNFGSNALVTFAFSPLQEFLGPANIFLLFGAISLLSLVFVILKVPETKGLTLEEIESKLLK

SEQ ID NO: 56725 - protein, 201 aa, Oryza sativa
MSETRWRWRMLESTRISVWNSGNPCLDARLARFTATRVPSRSTPRYTFPNPPTPRMFASSKSPVATMISASGMWSFMFILRGVTTALPNEPSPSGVNGDHGVPTLSFSSSSGTGSVARRCLRRTSSTHNATPARTAAPSTAAVTATTTTLLVLPDELAGVISTALSFMISSPFSIAFLLSLLAALPMLTVRFSPAVGTTAT

SEQ ID NO: 56726 - protein, 75 aa, Oryza sativa; identical to SEQ ID NO: 29212

SEQ ID NO: 56727 - protein, 379 aa, Oryza sativa; identical to SEQ ID NO: 29800

SEQ ID NO: 56728 - protein, 472 aa, Oryza sativa
MSPCNYFVYTAGPGRPWLDLLPDPNAMPFNSQQFGLFPCRSGVSEHYDVAFLNSEWVASDEACQFELCTFSSKTGRWSSKPVLLDLSPSEIHKVAIEHETDKLITIGHDSLGLVDLWRGIILLEKLFDDYPVMRYMTFPKPVVYTIDAYGATVCGEIAPECARDVACCDGLIKFVDIEYCYSDDVNGNGWKATIWNRMLSWKDWRKRFSVDKFDILVDPSYSTVLPDLWDDNTKMMQLKKLICTIPTLSMYDDDFVYMMSTMTEEDKNAWIISVDMKQNTLQAVAPISAERFSVLCSDCRPCAFSKYLKITSGVVIPNPVGEYTKRNHLQDRVLEALRTQDSLNELDDCSEFERSNFEEYRSLVQSSPVSSLHSNIQNVAGYYASNDIEKAASKAVNICLRASEDLNQVLQESTSYPSAHAEAIRSKINVVLRAIGSLVQTVPVQPRMTTVADSHGVSKIYSEEEKNNSHEP

SEQ ID NO: 56729 - protein, 210 aa, Oryza sativa
MLHEQVLHFVEFIPCPISQSSLSALMSIDWQSYGFKFKGGFIDDDGNAELQWDNMAFSHVDIAIHTYHEGAVDEWKSSQPERHLLRKALKSALFGLKADHAEDFLRCHGQKVREYVPDLAESIAGLILSSNDQEFQDECIALLGLGSDQDLTEGAVRSCIGEKMNRIVEMNDTKENVEHNAPYLFECERFDEDYSLLDEDDPDEDMIFDF

SEQ ID NO: 56730 - protein, 311 aa, Oryza sativa; identical to SEQ ID NO: 31724

SEQ ID NO: 56731 - protein, 194 aa, Oryza sativa
MADPRLFSSGSGTRDDRTDASGRRLYNPYQDLNIPYKQLYDLPTSPEFLFQEESLAQRRSWGENLTYYTGIGYLSGAVAGAAVGLRDAARNAEPGDTAKIRANRVLNSCGSNGRRMGNTLGVIGLLYAGIESGMVAVRDRDDWINSVTAGLGTGALFRAANGPRSAAVAGAIGGVLAGAAMAGKQAAKRYVPAL

SEQ ID NO: 56732 - protein, 392 aa, Oryza sativa
MIHLRRSFLSRLLHPPCPTPANPLPLHRLLSSAAAAAPIPPEPFAVEDYLVDSCGLTRARAKKASGKLSHLRSPSNPDAVLAFLSGLGLSRPDIAAVVVNDPLFICARVDKTLATRVAELTDLGLSRSQIARLIPVVRSLFRCKSLAPRLAFLLTVFGSFDRCLEVIKTNYGVLSSNVEAVIKPNLAVLKECGISIADRPSYAFASRVISRPTKHLEEAVVLANEFGAKQGTRVFTNAVMIFGILGQEKLAKKLEFFKKLGWSQDDLSLAVRSMPHILAMKEERMRRGMKFLTEDVGLEIPYIARRPALTMYSIERRLLPRHCLINVLKGNGLLKANYDFYNISVISNDDFMEKFVQPYVESVPGLGDAYASSCTGCGVHQLKLLSKRKTKC

SEQ ID NO: 56733 - protein, 437 aa, Oryza sativa
MNEKDATDLEERSEASEHGQALSFHGGAMFLQEAQIASPAAANNALTSMANPFPIPPGLWNPPSHNMGLGETSFSSLLGMLSAGAPPPFVATPGFVDSTAGFPCYNGGNLGAMINHPFPGIHQPLGDFQNGVEPCREIEDIEIEGSKNVSQTGEKQQGDGETTHAVDSSSKELSMPGRNGGAGHDEGTRVSCSKKRKRSGQDGGVKHAEGGEQLATVGSAQKNEDDEKGEPERSSVASGKSSGKQIKDNAGSPKEDYIHVRARRGQATNSHSLAERVRREKISERMKYLQDLVPGCSKVTGKAVMLDEIINYVQSLQRQVEFLSMKLASVNPTLDFNIERILSKDIFQCRGTTASSAFGFFPDIVHPRLHPPKYTQVGMPSIVNPTDAFGRVIHAPLGTNSAFKEPKHQMPNNLNGEFQDVIEMPFTHDHHGSNDQP

SEQ ID NO: 56734 - protein, 405 aa, Oryza sativa
MKDVPNVAEKACGALYFLAQGYVDAGSASPLTPFFQDIIQSLLFVTHREDAGESRLRTAAYETLNEVVRCSIEETGPIVMQLVPVIMMELHQTLEAGKLSTDEREKRSELRGLLCGCLQVIIQKLGAMESTKYSFLQYADQMMELFLRVFACRNATVHEEAMLAIGALAYAAGPNFSKYMPQFYQYLEMGLQNFEEYQVCAITVGVVGDLCRALEDKILPYCDGIMTQLLKDLSSNQLHRSVKPPIFSCFGDIALAIGENFEKYLIYAMPMLQSAADLSAHAAAADDEMLDYTNQLRNGILEAYSGILQGFKSSPKTQLLMQYAPNILNFLDALYNGKDMDDTVMKTAIGVLGDLADTLGVHAGPLINQSISSKKFLEECLASGDPLVKESADWARVAISRAVSG

SEQ ID NO: 56735 - protein, 479 aa, Oryza sativa
MEHLSEELIIEILKRITRTSDLNSVSLVSKQLYAIDAEQRATICIGCGLSTEDFSALCSRFPNLLKVEIDYSGSTPGNGNHIDNQGLFVLTSCCTLLNDITLSFCSKINDAGIACLTYCKKLMSLKLNSIPEVTSSGLLMVAFGCKALSSLYLNDCKGIAGSTEWLEYLGSDGSLEELIVSNCKGVSQYNFLKFGPGWMKLKTFEYENKENFFSIHPRYGSSVKANTHRYELCCENLKDLKLVRLVTEPDGPEIGLRFLLGKCKALEKLCLEYVTGVIDNDMIVLSQACKNLKSISLWLKPEHYVVGGHIEFRTGFTDESLKALALNCPLLQDVELTFTGCAHWDPPEIGFTQEGLVSFVESCPIRVLVLNGALFFNNKGMKALSSAQFLETLSLIDCNEVTDHGMRFIVHFPSLINLTLRFCHNVTNAGLSELAHAQKLQSLDVGGCGYISQKGVLGAAKSVYYEVNCKSLGHYKRMC

SEQ ID NO: 56736 - protein, 883 aa, Oryza sativa
MSSAANVMLAIHEKRTTPTDLYRPLRLYIASAYSEREAAAADDDLAAVRDLRADVEQPSLPDPSSLERRRDALLAYARALSLVEPRFPISSDRANVHSLAFTWHDAFKTGKKASVASIHLEKAAVLFNLAAVYSQIALAADRATDVGIRTACGSFQSAAGAFAWMRESGVAAKAVAAGATTVDVTPECAAMLEKLMLAQAQECFFEKVIAGGKPPALCSKVARQVGIFYEEAYAALSAAPLSQHFDKTWVSHVQLKAAQFYADACYRCSLDLHEKEEIAQEIARLKIGISALADAKKVARGVAAPLLDSVNKLESNMKTNLERAMKENDRVYLMRVPDASSLGALPAASLVKPTSLAEVLDASKERLFSSLVPDGSMKALSKYTEMVDNIIRTQAEKLQQASEITRVRLKEMDLPDSILSLEGNITLPLDLKEDVEAVQISGGPAGLEAELQQLRDLSRVNQELLVQTEEMLQKEANEDAQFRTQFGSRWTRPQSSTLTKNIQDRLNLFASNLKTAGDSDSQIERGLKESYPLISILDRRPIESALPSISRPIMSLDGNEDAIVGALKQSLRQLESLGAQRAGLEDMLKEMKRKDDILPKLMAGVGSHDDLFKKEISKYDPVCAEIADNIVAQEQLLLQIQAQNEQFAAVFNLEDYKVARERCYKQIAAAVAKYRDIKKNINEGLNFYVTLQEAIGKIKQQCSDFIMTRNIQCREMIEDVQKKLAGFSFSSSSSQASMQRNTSVPPDQNSPSPPPPSSHAPHAQGPYGVPPGGDSRPGYSQPEQRPAYSQPYPPYGAPPQQPPYGAPSQQPPYGAPHPGHYQQPPHQQPPNHDYGQQAYPGGWRGQYYNPHQPQPQPQPPYPQPPYNAQGSYPPHQSSYYRPQ

SEQ ID NO: 56737 - protein, 270 aa, Oryza sativa
MGSSTSAFVIRWINFFTMILALLVVGFGFWMSTHNDECRRSLTIPVMGLGGVIFLISLVGFLGAWKKIACLLWTYLVMLFVVLVAIMVFTVLAFIITNTGTGHSVSGVRYKEYRLQDYSSWFIKQLNDTEKWTHLRSCLVKSDDCNGLSRRYKTLKQYKLADLTPMESGCCRPPAECGYPAVNASYFDLSYHPVSTNVDCKLYKNARSVLCYDCDSCKAGVAQYMKTEWRVVAIFNVILFVILSFVYFVACCARRNTGESDSKVPTRWHA

SEQ ID NO: 56738 - protein, 199 aa, Oryza sativa
MASLTIVVATIFLLSLTSASVAVHGRSSRRRFVRSYDEPCMEMRLYLHDILYDYSNSTSNSTAAAATKPTALANAVPSTGGTFFGEVVVFNDPVTEGRALPPSLEETAVRAQGLYLYNSKEAFNAWLAFSIVFNSTGRRGTLNLMGADIIAEKTRDISVVGGTGDFFMSRGVATLRTDAFEGFTYFRLQMDIKLYECYV

SEQ ID NO: 56739 - protein, 158 aa, Oryza sativa
MGKRQQQRRLVRFAVAAAVVVAAALILTASAKKSGDVTELQIGVKYKPESCTLQAHKGDKIKVHYRGSLTDGSVFDSSYDRGDPFEFTLGNGQVIKGWDQGLLGMCVGEKRKLKIPAKMGYGERGSPPKIPGGATLIFDTELIAVNGKTTGGASNSEL

SEQ ID NO: 56740 - protein, 46 aa, Oryza sativa
MLMLPFSSTNGEGRYTTTTAFHFLMDSTTRRSYDFEEDKTIKTTTS

SEQ ID NO: 56741 - protein, 424 aa, Oryza sativa
MSSGGGGGDDYKREESVALMVIVSLAALSLLSLVAAFAYYCYITRKVSRRLHSLDLPKHHRRSSSSSPPPMPPPLPPPPPSANAPTLGKESPSSNSASDGAAAAVVVGGERGAVQVFSYRQLHAATGGFGRAHVVGQGSFGAVYRGVLPDGRKVAVKLMDRPGKQGEEEFEMEVELLSRLRSPYLLGLIGHCSEGGHRLLVYEFMANGGLQEHLYPNGGSCGGISKLDWPTRMRIALEAAKGLEYLHERVNPPVIHRDFKSSNILLDKDFRARVSDFGLAKLGSDRAGGHVSTRVLGTQGYVAQEYALTGHLTTKSDVYSYGVVLLELLTGRVPVDMKRPPGEGVLVNWALPMLTDREKVVQILDPALEGQYSLKDAVQVAAIAAMCVQQEADYRPLMADVVQSLVPLVKNRSTPKTCNPSVQA

SEQ ID NO: 56742 - protein, 460 aa, Oryza sativa
MAAAGRTLGCIYAGTLVTASAHIITAVIGSGVLSLAWAIAQLGWVIGPAVLVAFSVITWFCSSLLADCYRSPDPVHGKRNYTYGQAVRANLGVAKYRLCSVAQYVNLVGVTIGYTITTAISMGAIKRSNWFHRNGHDAACLASDTTNMIIFAGIQILLSQLPNFHKIWWLSIVAAVMSLAYSTIGLGLSIAKIAGGAHPEATLTGVTVGVDVSASEKIWRTFQSLGDIAFAYSYSNVLIEIQDTMRSSPAENEVMKKASFIGVSTTTTFYMLCGVLGYAAFGNRAPGNFLTGFGFYEPFWLVDVGNVCIVVHLVGAYQVFCQPIYQFAEAWARSRWPDSAFVNGERVLRLPLGAGDFPVSALRLVWRTAYVVLTAVAAMAFPFFNDFLGLIGAVSFWPLTVYFPVQMYMSQAKVRRFSPTWTWMNVLSLACLVVSLLAAAGSIQGLIKSVAHYKPFSVSS

SEQ ID NO: 56743 - protein, 148 aa, Oryza sativa; identical to SEQ ID NO: 30394

SEQ ID NO: 56744 - protein, 844 aa, Oryza sativa
MDAAALQYENQKLVQQLEAQKSKMRALEGKFKELRDEQCSYDNTLICLNKMWNQLIDDLVLLGVRAGGDLNGLQALDHEEMSEESLESCPSEEIFLFRLLNSRNFRNNDDSSLSKLVEEALALRYSTTVTLMKSLQEAFAVQQARSESLSLALNGQNSSEDVIVALENHNDYLKEVVDNLRQAVSIINRKHEKYLDEIEAFKNNQSRELHEVKCLSGELEESMAELEESRRKLAVLQLQTGGGSLMNTSAPNGVNGSVSTDKSSDKGMGWRDLKDAVEEAKTLAANRLFELHETQEDNLILSKQLEDIQDQLKDENYIVTSKPYTILSDQLHHLNAEIERYRGLVEVLQNEKDQLMQKEEEMLAKAESVDAVQQSITTYKAKIEDLEHEIQKLMAEKNDLEIKAEEALQDSGKKDFKDEIHVMAASLSKEMELLDNQMNRSKDAASEALALREEADYLRTLLAKKIDEQKEISDRYNTQVTEIKSLKALIETLDQEKQELQFIVDMLGKECSESRAISEIEESENRARKQAEYLRKCLEEHNLELRVKAANEAETACQQRLSIAEAELEDLRAKVDASERDVMKLKESIRIKEAEVDGHISEIETIGQAYEDMQTQNQHLLQQVADRDDFNIKLVSDSVKMKQAYGSLLAEKNMLQKQLQHVNSSLESSKLKITSGEEQMKTYVAQAMKSSSENRHLAISLERTMLEVSDAEKELKWLRSATGSAEKEYEINQKKIAELKMELERERNERIKLEEEYEEVKNEVSELTSETEETTIQKLQDEIKECKAILKCGVCFDRPKEVVITKCFHLFCSPCIQRNLEIRHRKCPGCGTPFGQSDVREVKI

SEQ ID NO: 56745 - protein, 89 aa, Oryza sativa
MEGVPIGRKLDLLLLDGYDSLLIKLCHMFKTPITYADVMECHQQVPGQKAAHVLTYEDQDGDWMMVGDVPWELFLSSVKKLRIARMDKC

SEQ ID NO: 56746 - protein, 127 aa, Oryza sativa
MPLQCLFMVFLNLKHVVNTWIGYDWLFFLSLVKAQVENFATALGLTSQPNCYLTLLALSTRKEISPVHACVVSYPECRLGVLHEWRQGGGIGNHILCSMISKVSHPLINKNLTKSACCSFHNIPLAR

SEQ ID NO: 56747 - protein, 399 aa, Oryza sativa
MAMAETVRLPEQQRRRPLTIASLPEEIMSEILLLLPPKSILQCRAVCKAWRDVTSDRAFLLTHHRRQPPQRLLTFIRDVGSHHDDLDILDYCVEAVDFRTHQFQSLARFTGQDYDCSLEDSPFTVHASCDGLLLMSYNNYLHLCNPTTRQWLWVSPPALQHDKVVGLYAHGHPSEYRVLYYREFGLGRTFYITTVGSRKERRIWPHSSSESLRKWLTKGTEDTEFNKPFLFHGNLHWLPQSGRQNKIVVFDTLDEAFRWLHVPFKMHNVSSLLEIEGSLAMSNSHIGSSKVDLWLLQDYKHMVWVHKYRIELPVIEIRRLVEDDVWFLHIVSQEGDVLVDGSYWQFHYDMKGNLLEKFQCSGRMLNITPHILQESLVPHEVFQILDNESRHAPHFFRGL

SEQ ID NO: 56748 - protein, 485 aa, Oryza sativa
MGTDIAGDGEPSSPPPLPVPDGLDDNGFPLPSSPTAATAATSFADDFYRSGTDWSSLLAAPSPPPSSEESGKNKSGDSLVQRSLFQAWGIDRRPRREEEVAGVAGGAGAGASSAPSGSWPGRKRRRGGEVEAAADRKPLACPFYKKIPGTPFTVDAFRYGAVEGCNAYFLSHFHHDHYGGLTKKWCHGPIYCTALTARLVKMCLSVNPEYICPLELDKEYVIEGVSVTLLEANHCPGAALIHFRLGDGKKYLHTGDFRASKSMQLYPLLQRGQINLLYLDTTYCNPKYKFPPKEDVIDFAVRTAKRYLQKEPKTLIVVGAYSIGKENVYLAISKALQVPIYTDASRRRILHAFGWSDLSKMICSDSQSSSLHVLPLSSLRHENLQKYLETLKQRFLAVLAFRPTGWTFSEETGNQLDLIKPSSRGKITIYGVPYSEHSSFSELREFVMFLRPQKVIPTVNVGNAASRDNASTFSGMAEGLVRDEA

SEQ ID NO: 56749 - protein, 767 aa, Oryza sativa
MSALMAFTVQQNSLSGTIPPNAFSNFPSLQLIGMDHNKFHGSIPTSIANASHLWLVQLGANFLSGIVPPEIGGLRNLKILQLSETFLEARSPNDWKFITALTNCSQFSVLYLASCSFGGVLPDSLSNLSSLTNLFLDTNKISGSIPEDIDNLINLQAFNLDNNNFTGHLPSSIGRLQNLHLLSIGNNKIGGPIPLTLGNLTELYILQLRSNAFSGSIPSIFRNLTNLLGLSLDSNNFTGQIPTEVVSIVSLSEGLNLSNNNLEGSIPQQIGNLKNLVNLDARSNKLSGEIPTTLGECQLLQNIYLQNNMLTGSLPSLLSQLKGLQTLDLSSNNLSGQIPTFLSNLTMLGYLNLSFNDFVGEVPTLGVFLNASAISIQGNGKLCGGVPDLHLPRCTSQAPHRRQKFLVIPIVVSLVATLLLLLLFYKLLGSVQENKIKDTINHMHGRPSFDLLLSAWQGQQTVSQRPNLLGSGSFGSVYKGELDKQSGQSKDIIAVKVLKLQTPGALKSFTAECEALRNLRHRNLVKIITACSSIDNSGNDFKAIVFDFMPSGNLEGWLHPATNNPKYLNLLQRVGILLDVANALDYLHCHGPTPVVHCDLKPSNVLLDAEMVAHVGDFGLAKILFEGNSLLQQSTSSMGLRGTIGYAPPEYGAGNTVSTQGDIYSYGILVLETVTGKRPTDKKFIQGLSLREYVELGLHGKMMDVVDTQLSLHLENELRTTDEYKVMIDCLVSLLRLGLYCSQEIPSNRMSTGDIIKELNAIKQTLL

SEQ ID NO: 56750 - protein, 871 aa, Oryza sativa
MAAATAPVAGAAERQQQQQQQQRGGAASASGNAVFKSGPLFISSKGIGWKSWKKRWFILTRTSLVFFKSDPNTLPQRGGEVNVTLGGIDLNNSGSVVVREDKKLLTVLFPDGRDGRAFTLKAETSEDLFEWKTALEEALAQAPNAALVMGHNGIFRNDTTDPYEGAVPNWREKRPIKSLVVGRPILLALEDIDGSPSFLEKALRFLERHGIKVEGILRQAADVEEVDKRMQEYEQGRTEFAQDEDAHVIGDCVKHVLRELPSSPVPASCCTALLEAFRLESKESRINSMRAAISETFPEPNRRLLQRILRMMHTVASHTAENRMTASAVAACMAPLLLRPLLAGECEMEDDLDMNGDSSAQLIAAANAANSAQGIVTTLLEEYEGIFYDEHLRCSLSPDSQIEDSGSEESTDDETVDIKDSGFHDAENDADQELDDSERILSGKLSETSACTAGDLYDYKVADDDSDGEPSTEDKALETKVDVNDAQHSHLAENVSVNVQRSPNEKDPPNMVSSQDSPLSMGDILSSLDAGISLPGPGPEYSVDRQSIKSNGTQMHVKRSNFWGRNNGRKSQQSELADSSGEEELAIQRLEITKNDLQIRIAKEARGNAILQASLERRKQALHERRLALEQDVSRLQEQLQAERDLRAALEVGLSMSSAHISSSRSMDSKTKAELEEIALAEADVARLKQKVAELHLQLNQQRQHQYGSLADANDRYQHLPNHLPQNFVQSGFDMNLAFCNQEKKQRNEGPAGASHWRSIKQHVLPHGSSRPFSRKHSMDASSSDSREASTSMPADGNSMSVNIPKATEGVEYGRQAPVASSTLVELTTRLDFFKERRSQLMEQLHSLDLGNGSANHGFPYKSSSPWNSPR

SEQ ID NO: 56751 - protein, 375 aa, Oryza sativa
MITFGKVFCTKSKPNCNACPMRSECRHFASAFASARLALPSPQDKRLVNLSNQFAFHNGTMPTPNSTPLPQLEGSIHARDVHANNTNPIIEEPASPREEECRELLENDIEDFDEDTDEIPIIKLNMEAFSQNLENCIKGSNKDFQSDDITKALVAISNEAASIPVPKLKNVHRLRTEHYVYELPDSHPLMQQLALDQREPDDPSPYLLAIWTPDELKDTREAPKPCCNPQTEGGLCSNEMCHNCVSERENQYRYVRGTVLVPCRTAMRGSFPLNGTYFQVNEVFADHSSSHNPINIPREQLWNLHRRMVYFGTSVPTIFKGLTTEEIQHCFWRGFVCVRGFNMETRAPRPLCPHFHLAASKLRRSSKKAATEQTH

SEQ ID NO: 56752 - protein, 492 aa, Oryza sativa
MFQLCKYSSRRRISPCKRGSICSNYPMAPCSTIARFMNLGDLARCPKNLCNLLFRVVQSKLLAPLHSSLLKEVQKDDGDQPSMAESVVANLPELSQDILMEIFALLEIPDLVRAGSVCNSWLSAYNELRSLGIYKLSQTPCLLYTSESAGDSVVCLYSLVEKREYKITLPEPPIRSRFLIGSSLGWLITADDLSEMHLVNPITGEQIALPSVTTMEHVNPIFNESGALHKYEFSLHTATRVSYAEPSIFALGELRDYIYSKAFVFTDTFTGGCIVVLIHEPAGQISFARVGDDKWTWHPSHSHYSDCIYIDGLLYALTAQGEIHTLDLSGPTITMKMIIGSLSYSRYIVQAPWGGLLLVWRSVEDIEEDYEADLPADHATFVRYTREIKIYSVDTMGKKHVEINNLDGHVLFLGHNQSLCLSTEQYPHLKENYTYFTDDDEAWLFGFKNKRRDIGLFDLKHNSREELVSPQLWSNFPAPVWITPSFTKLNFA

SEQ ID NO: 56753 - protein, 246 aa, Oryza sativa
MFPGLIHHHRLLDADVGGGGGGSSAGLVLTADPKPRLRWTADLHDRFVDAVAQLGGPDKATPKTIMRTMGVKGLTLFHLKSHLQKYRLGKQSGKEMAEQSKDASYILGAQSGTNLSPTVPTPDLKESQELKEALRAQMEVQRKLHEQVEVQRHVQIRMEAYQNYIDTLLEKACNIVSEQLNGFSISDHDLTSAGVMLSSSDTLSPSIFHQLSVSSISLHSPGGKSSPFAADADLFFQKAPEKRKSY

SEQ ID NO: 56754 - protein, 134 aa, Oryza sativa; identical to SEQ ID NO: 55217

SEQ ID NO: 56755 - protein, 274 aa, Oryza sativa
MFGWLLFSLQAGWCDSQGTADDVRSKIHMRHEGAIKRERARTYAQSHQRCSNHGGRPSSPAVSLKHHGNGATRSNHSWSYLEGWMATKPWESRLMEQTHTENSTNSRCSESVEEVSVGGPKLSDASSVKIRRNNVTTRVAAKPPSMISATSSDFVCDESSPSTSSVTPLSANNSLATERRSDCGQVGGPSYMSLTKSAKARLSGYGSHKPPLQRQRSGDLLHHNNRMAFSSIDVQSTAGSEVSVTSKRLNSLALKGRATRSLDKENERRPSSLL

SEQ ID NO: 56756 - protein, 392 aa, Oryza sativa
MAGDALRAADLPGRGRGLLAARSIREGEVILTEQPLLLYPASLASLPSFCSACFRSLSAAASPCPSCRAAGFCSPSCAAASHPRLLCTALSGGGGNGNLASAAEPHQEPLLFLLSAYSLPEPSLRMLLSLSSAATPPPSDQDPGSLHAMVAALVPPQMLPPGFSPDLTAALLSKDRTNSFSIMEPYRPEVPQPLRKARAYAVYPRASLLNHDCLPNACHFDYADRPGPGNTDIVVRALHDITEGREVCLSYFAANWQYKDRQQRLLEDYGFRCECERCQVESKWKQDDDSDGGDGDDTMEEEEEDGNGGEGGDDGMEQEEGDGGSDSDDDFPHSYFFVRYLCNHGECYGMLAPLPPLPNGEPSHVFECNVCGNLKNEDEIDAPDGGDSSMAD

SEQ ID NO: 56757 - protein, 491 aa, Oryza sativa
MGSTSRPVDDEVLDAATGVHYSALRLEELNMNGSVSGEDQPTTSGVENGHQEPFVIGVAGGASSGKSTVCKMIIDQLRDQRVVVVTQESFYYGLSDEELVHVHDYNFDHPDAFDTELLLSCMENLKHGKAVDIPNYNFKTYKSVASARKVNPSYVIILEGILVFHDSRVRDLMNMKIFVDTDADVRLTRRIRRDTIEKGRDIKTVLDQYSKFVKPAFEDFILPTKKYADIIIPRGGDNDVAIDLIVQHIRTKLGQHDLCKVHPNLYVIQTTYQIRGMHTIIRDAATTTHDFIFYADRLIRLVVEHGLGHLPFKEKQVITPTGSVYTGVEFSKRLCGISVIRSGESMENALRACCKGIKIGKILIHREGDNGKQLIYHNVPKDIANRHVLLLDPILGTGNSAVQAISLLLKKGVQETNIIFLNLISAPQGVHVVSKRFPRVKIVTSEIDFGLNDDFRVIPGMGEFGDRYFGTDDYQSSTPFFCDEKNRVRLL

SEQ ID NO: 56758 - protein, 72 aa, Oryza sativa
MGGVEQEQLLSLGVLIDIVDEQWMRDTLPADDVPVPPAMAVKTEEAEDPAPANQESQPAQGDVWRDFTLENL

SEQ ID NO: 56759 - protein, 358 aa, Oryza sativa
MVGDRKRPAPFAGFSPFARSLLFSASSSKPLPPPEDPPAAAADEIPSGIAGSSRDMPPPKRAKRAEPSSDEERYSSDDESYSSDSDDSDDASEELDTVQADFAFYDPKPGDFHGVKLLLKTYLDSKPWDLTGFVDLILEQTTVGTVVKIADDEEDGEGNGADGSSTGGNDDLFGLISVLNLGRYSEHRCMKDLKDYLLAVCGDKDTKKKLKQMLGDKAPDVGLLVCRRFVNFPYELVPKMYESLFDEVSWATEDEPTQELRDSFRFKQYLMVVRVLERKTPAKQKAKNSTEEDEPIIYPKLEDEIFRELSSWSFTFPIRSEQSAQQEMKNYKEMGLVMAVKAEAIPKFRKKLEDLLSE

SEQ ID NO: 56760 - protein, 54 aa, Oryza sativa
MGFFRTSFTLMFGMGCGVYVAQNYDVPNVKKLFNTYMFLAKHIEETYRKPKRDD

SEQ ID NO: 56761 - protein, 199 aa, Oryza sativa
MSMPEAGRSERDGREQDDDYEQQQARVLMALMQGFCAARYRKADNIPCPIVQGLYLGSVGAAMNKDALKSLNITHILIVARSLNPAFAAEFNYKKIEVLDSPDIDLAKHFDECFSFIDESISSGGNVLVHCFAGRSRSVTIIVAYLMKKHQMSLENALSLVRSKRPQVAPNEGFMSQLENFEKSMQVEQERKLMQPVQN

SEQ ID NO: 56762 - protein, 573 aa, Oryza sativa
MCANSNQSRRLFDDSRIRTSRFEKINDLCPGTGVKGYVKSVNSKGCFIMVSRTIEARIILSNLSDEYVENPQNDFPVGLLVHGRVLSSEPQSGKVEVSLRENTGSKSQKSDDISYSDLHVGDIIAGQVKRVESFGLFVTIQGSELVALCHVSELSDEPVLDIHSCHKAGDKVKAKILKIDEERHRVSIGMKKSYIGPDSTGDTSDDEDDEIVPEEISRNPVMGRDRNHALVLPKPESRASVLPLQVSLDESEGSDQENDNKGQEIANGTEVDDKKSNKRLKEKARKQRELEISALEERALQRDIPQTPDEFEKLVRSSPNSSFVWINYMAFLLDLADVDKARAVAERALRTINIREEEEKLNVWVAYFNLENEYGSPREDAVKKIFQRALQYCDPKKVHLALLAMYERTEQYTLADELLDRMTKRFKTSCKIWLRCIQLSLKQSKDVECIKLIVKRALLSLPQSKRRKFLSQTAILEFKCGVPEEGRSRFELILREYPKRTDLWSVYLDQEIRLGDTEIIRALFERVTCLSLPPKKMKFLFKKYLEYEKSQGDEERIEHVKQKALEYVQSSLA

SEQ ID NO: 56763 - protein, 286 aa, Oryza sativa
MERATTSGGGGGGSQPPRGVGLPLVEVQAAAASLRRSEVFYVVKELLGFVLYMHHQIPAVLQNLENEFASLKEEMTEMALPPGEMKPSDQRKYNTRKREVRRRIKKQEKLMNGLSSVFSALQKALDEVPSIEGVLLILGGSLVRPLFVYDITISHGRFDAGSANERGASKLAQSVSRKAIRALISSGAGSLSYTGPTKLFVLVRCPCTLNLPLDFLPKRDFRYSKKVVPLQMCIKCNIAGIQIDNQQITSIVDASRCTSESTISEVIWFQCKHTIRGLPCKASLEE

SEQ ID NO: 56764 - protein, 519 aa, Oryza sativa
MNGEEAPAGSGGGGGGRAEIDTSAPFESVREAVDHFGGGAAAVWSSCLVNRMLTPPKEHDQMNGQTLQLEKELIIKESQTLDVPKELESSKRIISDLKLKVQNDSAITGHPGQTEAPGAGPEERRSSENVETDGELGGLDSQNLQPPSSVLMQLEQAKAYLTRTTADLAEIRASVESLCNEIAKEKILVERSREKVCSNTSLISSLEGELDRTTHKLQTLNDRQRRREDSSHILMEIKKVTSEIEQLKSASNASKSEATMLAAEIEQTKASIATAEVRCLAAKKMEDAARAAEALALAEIKALLSGEASAGDLQGTDGVNLSLEKYFELASKAQECDVSSRKKIEAAMLQVEEANRSKSNSLNKLEEAKLEFEKCKIALQDALKRAHAANRGKLAVEESVRRWLSESGYKRHSFHDSSKLKNAADITDVSKSFLKPTLSIGQILNLKLMGPDGYDKSVWDDTTEASNVSLGQILNRRNAVFCNSDITSQKILSGKRKKFAFTGLSVLLAKQAKRQEQEK

SEQ ID NO: 56765 - protein, 324 aa, Oryza sativa
MAAAVPTGCYKCGRPGHWSRDCPSEPAGAGAASTDNPNPNPNPKPSASRFAPYPRPRFGKSAAAAAAAEGEDGSGGQAQGKKKKKERATRPKLTPDLLLSDDGLGFVLRYFPKAFKPRARPGHEVEDLGNLIKLYTDWHSRLIPYYSFDQFVRKVEKVGASNRVRRCVSELRDRVARGGDPTLLHEPPVEVIPEGEPDGATAEDPIFGTEVPATENHGVDQVQEDIDIPVESNDVDPMQEDLLNEIYNKEADEPQIPAVGGTAEETTPAMAPKEAKPQDDPPREAQNQPGKIQLTEEQRARMEANRLRALERAAAARARASQPA

SEQ ID NO: 56766 - protein, 611 aa, Oryza sativa
MAISSSGAAVPLAGLLQSTPYPQTERGMKAVVCASHGAVGSLLWKLSALLSDEYNLLTGVKSNIMFLKAELESIDVFLKKMYEFEDPDEQSLFWMKEFRELSYDIEDIIDASMFSLGHESNRRPRGFKGFAGRCMDFLTNVKTRHWIAKKIHCLKCCVIEASNRRARYKVDGSVSKLSRTSLDPRLPAFYTETTRLVGIDGPRDKLIKMLVEGDDALVHQLKVVSIVGFGGLGKTTLANEVCRKLEGQFKYQAFVSVSQKPDIKKILRHILSQICWRECISDEAWDEQQLIHTIRQFLKDKRYFIVIDDIWSTSAWRTIKCAFPENNCSSRILTTTRIIAVAKYCCSPHHDNVYEIKPLGAIHSKSLFFKRTFGSEDKCPLHLKEVSNAILRKCGGLPLGIITVASLLANKASTKEEWESIHNSIGSALEKDTDMEEMKRILLLSYDDLPYHLKTCLLYLSIIPEDYEIKRDRLIRRWIAEGFIPTEGVHDMEEVGECYFNDLINRSMILPVNIQYDGRADACRVHDMILDLIISISVKENFVTLHGDQNYKIVQQNKVRRLSLNYHAREDIMIPSSMIVSHVRSLTIFGYAEHMPCSVKIAIYASVRCRK

SEQ ID NO: 56767 - protein, 360 aa, Oryza sativa
MAEAYLADKCMVFCSRYLDGFETKHNRPSRNDDTHELDSYPIVKQGSSIFSHVGKPLGKPSNYVIRGMAKVQAHRYVLFNCSDVNKYLRAHADQIASTYPRRGVNPKTIERVQNEKFHEWFRAHIMDLERKNGLHIVNEDVRWLARGPLDAAKRYRAFNTRGFRFRPKRLDGVTQNSGVVLTAKKSSYTKASDANPILGDVTYYGRIIDIIELNYSGKFSVVLFKCEWVDVISGKGIKKDKYDYTLVNFSHLIHTGEKIEHEPFILPNQADQVFYVDDPMNPGWSVVRKMKPMDIYDTGKEEWIDEMEAEPFHVSHLGELFDQSNNQHWVRADVEGTMVDANNGLGTEVLWYFVSSIQGN

SEQ ID NO: 56768 - protein, 583 aa, Oryza sativa
MKPVERAKLVRSLRQESRRLRLLVLVIGFFLVTLTFVVISKPDALLFNLNGRLSVDHAPRSLLIRQRIHADSRRSADTFPAAEDPKVVDEDEGAEDATAKGTSEEEKRLLSSEPEQGKNEEAATASEVLGGGGEEDNKNGEEEGHTQHSEVTLPTVSNYTIRDAEDTDNGKQEDGKPNEKYEFEMDADKGDNVEPETDNEEWNKKPLCDFSNFRANVCEMRGNIRIHPNASSVMYMEPASSKREEIWKVKPYPRKGDELCLGHITEITVKSSKVAPECSKYHNVPAVVFALTGYTGNLFHDFTDVLVPLFTTASEFNGEVQFLITDMAIWWTRKHKVVFDKLSKYPLIDFNNDDQVHCFKHAIVGLHAYMEFTIDSSKAPHNYSMVDFNRFMRRTYSLPRDFVTALGEIPKAKPRLLIISRQRTRMFLNLNEIVAMAEEIGYEVVVEEANVSSDLSHFGKVVNSVDVMMGVHGAGLTNCVFLPQNATLIQIVPWGGLDWISRIDFGNPAEQMGLRYKQYSIGVHESSLTDQYPLDHEIFTNPLSFHKHGFEFIRQTFMDKQNVKLDCNRFKPVLLEVLDQLNQ

SEQ ID NO: 56769 - protein, 185 aa, Oryza sativa
MFGRVPRSNNTKYYEVLGVPKTASKDELKKAYRKAAIKNHPDKGGDPEKFKELSQAYEVLTDPEKRDIYDQYGEDALKDGMGGGSDFHNPFDIFEQFFGGGAFGGSSSRVRRQRRGEDVAHTLKVSLEDVYNGSMKKLSLSRNILCPKCKGKGHPRRAPAAAHRGPARAPGGVHRRHEGACRARG

SEQ ID NO: 56770 - protein, 140 aa, Oryza sativa
MQIFVKTLTGKTITLEVESSDTIDNVKAKIQDKEGIPPDQQRLIFAGKQLDDGRTLADYNIQKESTLHLVLRLRGGSRGGYTIQEPTLRALALKYREKKKVCRKCYARLPIRSHHCRKKKCGHSKELRLKKKFINSLSIA

SEQ ID NO: 56771 - protein, 770 aa, Oryza sativa
MSKRPKLGGFSIPRPTSYSFERSQPPQRLYVPADDPDLDDIAFSDDAAAPSDAPPAGGGGAAGDEEEIDPLDAFMAEIQEEIRAPPPAPKPEALRRADSDDEDDPVESFLRAKKDSGLALAADAMHAGYDSDEEVYAAAKAVDAGMMEYDSDDNPIVVDKKKIEPIPPLDHSTIEYEPFNKDFYEEKPSVSGMSEQEVADYMKSLAIRVSGFDVPRPIKSFADCGFPVQLMNAIAKQGYEKPTTIQCQALPIVLSGRDIIGIAKTGSGKTAAFVLPMIVHIMDQPELEKEEGPIGVVCAPTRELAHQIYLEAKKFAKPYNLRVAAVYGGVSKFDQFKELKAGCEIVIATPGRLIDLLKMKALKMFRATYLVLDEADRMFDLGFEPQIRSIVGQIRPDRQTLLFSATMPYKVERLAREILTDPIRVTVGQVGSANEDIKQVVNVLPSDAEKMPWLLEKLPGMIDDGDVLVFAAKKARVDEIESQLNQRGFRIAALHGDKDQASRMETLQKFKSGVYHVLVATDVAARGLDIKSIKTVVNFDIAKEMDMHIHRIGRTGRAGDKDGTAYTLITQKEVRFAGELVHCLIAAGQDVPNELMDLAMKDGRFRANRDSRKGGKKSGKGKGGGGGGGGGSGARGRGRGVRGVDFGLGIGYNAESGSVPAPRSAALNSLKTGMMQNFKSSFVSASSSNTPSNSAPSRGAPSSFVRPALRGFVSGGTIGGDANQARAVLPAPSFVPASRPAENTVENANPNPESSRDRTRERKRPSGWDR

SEQ ID NO: 56772 - protein, 319 aa, Oryza sativa; identical to SEQ ID NO: 31957

SEQ ID NO: 56773 - protein, 206 aa, Oryza sativa; identical to SEQ ID NO: 37187

SEQ ID NO: 56774 - protein, 446 aa, Oryza sativa; identical to SEQ ID NO: 42048

SEQ ID NO: 56775 - protein, 136 aa, Oryza sativa
MQFNAPAAATAPPTKLLVGVRLNGDGVKVEELIRRRQRREQSIRRPLPLLHGSHGLSAPSCADPSSAAMGGVRSGDLFLSRSDPVVSQRPAHADPWPATTGGSRSGVSTVVAASLPPPLLHARPIHRTLPSPSSPC

SEQ ID NO: 56776 - protein, 410 aa, Oryza sativa; identical to SEQ ID NO: 47343

SEQ ID NO: 56777 - protein, 323 aa, Oryza sativa
MPRYDDRYGSTRLYVGRLSSRTRSRDLEYHFSRYGRIREVELKRDYAFIEFSDPRDAEEARYSLDGRDVDGSRILVEFAKGVPRGPGGSREYMGRGPPPGTGRCFNCGIDGHWARDCKAGDWKNKCYRCGERGHIERNCQNSPRNLRRERSYSCSPSPRRGRGRSRSYSRSRSRSRSYSRSRSRSLSGSPRARRELERSRSLSYSRSPRRSISPAANEKKRSPTPDGSRSPRSPQDQVSPPPKDNAERNGSDHGDSPRGRENSRSPSDGYRSPAAANGRSPSPRNNGSPSPMDNGSRSPRDGNGDGGSRGGSRSPRPSESPEA

SEQ ID NO: 56778 - protein, 882 aa, Oryza sativa; identical to SEQ ID NO: 54675

SEQ ID NO: 56779 - protein, 488 aa, Oryza sativa
MVVANGNVDTEEGTLEIGMEYRTVSGVAGPLVILDKVKGPKYQEIVNIRLGDGTTRRGQVLEVDGEKAVVQVFEGTSGIDNKYTTVQFTGEVLKTPVSLDMLGRVFNGSGKPIDNGPPILPEAYLDISGSSINPSERTYPEEMIQTGISTIDVMNSIARGQKIPLFSAAGLPHNEIAAQICRQAGLVKRLEKSDNILESSEDENFAIVFAAMGVNMETAQFFKRDFEENGSMERVTLFLNLANDPTIERIITPRIALTTAEYLAYECGKHVLVILTDMSSYADALREVSAAREEVPGRRGYPGYMYTDLATIYERAGRIEGRKGSITQIPILTMPNDDITHPTPDLTGYITEGQIYIDRQLHNRQIYPPINVLPSLSRLMKSAIGEGMTRRDHSDVSNQLYANYAIGKDVQAMKAVVGEEALSSEDLLYLEFLDKFERKFVTQGAYDTRNIFQSLDLAWSLLRIFHRELLHRIPAKTLDQYYSRDASH

SEQ ID NO: 56780 - protein, 28 aa, Oryza sativa
MYVHIYIARMVWYFFLRSIYIARGSECR

SEQ ID NO: 56781 - protein, 414 aa, Oryza sativa
MALVLHAGSGNKNAFKALIAAEYSGVKVELVKNFQMGVSNKTPEFLKMNPIGKIPVLETPDGPVFESNAIARYVTRSKADNPLYGSSLIEYAHIEQWNDFSATEVDANIGKWLYPRLGIAPYVAVSEEAAIAALKRSLGALNTHLASNTYLVGHSVTLADIVMTCNLYMGFARIMTKSFTSEFPHVERYFWTMVNQPNFKKVLGDVKQAESVPPVQKKAPPPKEQKPKEAKKEAPKPKAVEKPEEEEEAPKPKPKNPLDLLPPSKMILDEWKRLYSNTKTNFREVAIKGFWDMYDPEGYSLWFCDYKYNDENTVSFVTMNKVGGFLQRMDLCRKYAFGKMLVIGSEPPFKVKGLWLFRGPEIPKFVMDEVYDMELYEWTKVDISDEAQKERVSAMIEDLEPFEGESLLDAKCFK

SEQ ID NO: 56782 - protein, 274 aa, Oryza sativa
MLYIVGLGLGDERDITVRGLDAVRRCAKVYMEAYTSLLSLGLDPSALSNLEKMYGKEITVADREMVEERADQMLREAADADVAFLVVGDPFGATTHTDLVVRAKNMGVEVKVIHNASVMNAVGVCGLQLYRYGETISIPFFTETWRPDSFYEKIQNNRRLGLHTLCLLDIRVKEPTLESLCRGKKVYEPPRFMSVNTAISQLLEVEELRGGSAYGADSLCIGVARLGSDDQKIVAGPMKKLLDVDFGPPLHCLIIVGETHPVEEEMIEFHMIKS

SEQ ID NO: 56783 - protein, 79 aa, Oryza sativa
MAMAMAASLAAHHHLAGGGLLPTPRASGRNGRSGITISMRAQSGDSGSGKGDGGDGRVSGRRRVWRRRKLVCSLAELRE

SEQ ID NO: 56784 - protein, 273 aa, Oryza sativa
MGTLGRAIYTVGKWIRGTGQAMDRLGSTIQGGLRVEEQLSRHRTIMNIFEKEPRVHKDVFVAPSAAVIGDVEIGHGSSIWYGSILRGDVNSIHIGSGSNIQDNSLVHVAKANISGKVLPTIIGNNVTIGHSAVLHACTVEDEAFVGMGATLLDGVVVEKHSMVGAGSLVKQNTRIPSGEVWVGNPAKFLRKLTEEEIAFIAQSATNYINLAQVHAAENSKTFDEIELEKMLRKKYAHKDEEYDSMLGVVREIPPELILPDNILPNKAQKAVAH

SEQ ID NO: 56785 - protein, 670 aa, Oryza sativa; identical to SEQ ID NO: 47183

SEQ ID NO: 56786 - protein, 479 aa, Oryza sativa
MNVLASKIFPSRSNVASEQQQSKREKATIDDAKNSSKNKNLDRSVDESVLGIILGGGAGTRLYPLTKKRAKPAVPLGANYRLIDIPVSNCLNSNISKIYVLTQFNSASLNRHLSRAYGNNIGGYKNEGFVEVLAAQQSPDNPNWFQGTADAVRQYLWLFEEHNVMEFLILAGDHLYRMDYEKFIQAHRETDSDITVAALPMDEKRATAFGLMKIDEEGRIVEFAEKPKGEQLKAMMVDTTILGLDDVRAKEMPYIASMGIYVISKNVMLQLLREQFPGANDFGSEVIPGATNIGMRVQAYLYDGYWEDIGTIEAFYNANLGITKKPVPDFSFYDRSAPIYTQPRHLPPSKVLDADVTDSVIGEGCVIKNCKIHHSVVGLRSCISEGAIIEDSLLMGADYYETEADKKLLGEKGGIPIGIGKNCHIRRAIIDKNARIGDNVKIINVDNVQEAARETDGYFIKSGIVTVIKDALLPSGTVI

SEQ ID NO: 56787 - protein, 109 aa, Oryza sativa
MSPSACSTPPNPPRRPTVSLAEIEIASVLCVVCCRWHGACGRTDRPLCWPVIGHPRARGSMPSAFTNSQMLHPLSLGRLNVDQLVSSPFLIYNSSEPLHFKSIHDNSFG

SEQ ID NO: 56788 - protein, 163 aa, Oryza sativa
MRQHILELLMKKFSEKHRMKRLEARLYIPLYEEDKEECNEMILELAKLDFYLLQRLHREEVKEICEWYHGLESPRELFYARHRPAEAYFWALGVYYEPEYAKPRKLLAKFIATITPYDDTFDNYGLWKELQPFADVMQRFCSTSRSHFEKIILSKFQLYTYQI

SEQ ID NO: 56789 - protein, 96 aa, Oryza sativa
MTKKDPSRTVMEENPIASNFLKTQRYTRGRYAGQLQQLPLFGNSNGVPLVCNLIGQNATMMYHFHITRFQTSYLLLQKRWPFQPCHLERNSSQRPP

SEQ ID NO: 56790 - protein, 405 aa, Oryza sativa
MFTWIGNASSYEQQQWAAKVAEFLKPGVAVKHCKEGTESSAFWFALGGKQNYTSRNATHDVVREPHLYTFSLRNGKLEVTEIFNFSQDDLLTEDMMVLDTHGEVFVWMGQCVDAKEKQKAFEIGQKYAEHAAAFESLSPDVPLYKVVEGNEPCFFRTYFSWDNTRSVIHGNSFQKKLSLLFGMRSESGSKSSGDGGPTQRASALAALSSAFNPSSQKNKGNDRPKSSDGGPTQRASAMAALTSAFNPSAKPKSPPQRAGQGSQRAAAVAALSNVLTAEGSSQSPRIGDADTAELTPSAASPLSEGASEFSADKDAPGDGALSEGGRTEPDVSVEQTANENGGETTFSYDRLISKSTNPVRGIDYKRRETYLSDSEFQTVFGITKEEFYQQPGWKQELQKRKHDLF

SEQ ID NO: 56791 - protein, 319 aa, Oryza sativa
MEYRDKLVLAPMVRVGTLPFRLLAAEYGADITYGEEIIDHKFLKCERVTNESLGTTDFLERGTDTVVFRTCPQERDRVVFQMGTSDAVRALKAAQLVCNDVAAIDINMGCPKSFSLSGGMGAALLSKPELIHDILTTLRRNLDTTVTCKIRLLNTRQDTVELARRVEKIGVPALAVHGRKVKDRPRDPAKWDEIADVVSALSIPVIANGDVFEYEDFKRIKDATGAASVMVARGAMWNASIFCPKGKTPWEDVKREYVRKSILWDNDLKSTKQTIKEMIMHYSCLEFPEGKGVNKCDTIADLAKLYGEEYYNFVLSNRN
